United States Patent Application Publication US 2014/0271549 A1 - sequence listing, part 2

SEQ ID NO: 15 - DNA, 199502 bp, Artificial Sequence
  GLV-1h254
ttatgagaccatcaaagagagaaagagaataaaaatatttttgtaaaactttttttatgagaccatcaaagagagaaagagaataaaaatatttttgtaaaacttttttatgagaccatcaaagagagaaagagaataaaaatatttttgtaaaacttttttatgagaccatcaaagagagaaagagaataaaaatatttttgtaaaactttttttatgagaccatcaaagagagaaagagaataaaaatatttttgtaaaactttttttatgagaccatcaaagagagaaagagaataaaaatatttttgtaaaactttttttatgagaccatcaaagagagaaagagaataaaaatatttttgtaaaactttttttatgagaccatcaaagagagaaagagaataaaaatatttttgtaaaactttttttatgagaccatcaaagagagaaagagaataaaaatatttttgtaaaactttttttatgagaccatcaaagagagaaagagaataaaaatatttttgtaaaactttttttatgagaccatcaaagagagaaagagaataaaaatatttttgtaaaactttttttatgagaccatcaaagagagaaagagaataaaaatatttttgtaaaactttttttatgagaccatcaaagagagaaagagaataaaaatatttttgtaaaactttttttatgagaccatcaaagagagaaagagaataaaaatatttttgtaaaactttttttatgagaccatcaaagagagaaagagaataaaaatatttttgtaaaactttttttatgagaccatcagaaagaggtttaatatttttgtgatactctgaaaggaaataggaataggaataggaatagtgtcataatcgtatcacactattgagacagaaaaagaagaagtcgcgagaggtaactttttgtgaatgtagttaagaacatttttgttttgcaaaccggaatatagtgtccggtacacttttttaattcgtggtgtgcctgaatcgttcgattaaccctactcatccaatttcagatgaatagagttatcgattcagacacacgctttgagttttgttgaatcgatgagtgaagtatcatcggttgcaccttcagatgccgatccgtcgacatacttgaatccatccttgacctcaagttcagatgattccttgcacatgtctccgatacgaacgctaaactctagattcttgacgcattttgtatcgacgatcgttgaaccgatgatatcttcgtaactcactttcttatgagagatgttagacccgagtactggatgggtcttgatgtcgctgtctttctcttcttcgctacatctgatgtcgatagacacttcacagtctttgatcatagcaagagcttcttcatgagtgatcgcgggagagtccttaccttgtcctggggacacgctggacaatctagcattcactgtgtttccatcagcggattctgagatggatttaatctgaggacatttggtgaatccaaagttcattctcagacctccaccgatgatggagtaataagtggtaggaggatctacatcctcgactgatgtggaatcatcttctgattccacctcgggatctggatctgactcggactctgtaatttccgttacggattggcaaatcttatcattggtcggtgtttggtcttgctttgtgactttgataataacatcgattcccatatgatgtttgttttcttcttccgtacacgaggaggaggatgaggatgattgctgaagactggcaggcatagcagctgccgccaggcacatgcatgccaggacgatatattgtttcataattgctattgattgagtactgttctttatgattctacttccttaccgtgcaataaattagaatatattttctacttttacgagaaattaattattgtatttattatttatgggtgaaaaacttactataaaaagtgggtgggtttggaattagtgatcagtttatgtatatcgcaactaccgggcatatggctatcgacatcgagaacattacccacatgataagagattgtatcagtttcgtagtcttgagtattggtattactatatagtatatagatgtcgcccactagagttactgtctccgaatgcggcatgatagtatcattctttgctttcgttaactgtttggaggaagaatctttgttattgcatttaatctcgaaattcagagtgcacacctttctcctgtaaagaaacctgaagtcgctaccttattaagaacggagaagtatccatcacgaaatacgggattacagtctttatgattcatagtaatagttagttccgacgttgagatggattcgctgagaccggtagtggtcgtccgagtacacgacgtgtcgttaactggatacaggttaatttccacatcgatatagttaaacgtatttctgggtacgggttcgcatttatctgcggaagagacggtgtgagaatatgttccgagaccacacggagaacagatgacgtctccggatactccgtatcctattccacattttgtttgggaaacacatgccttgcatccggatgatcctttgagaagacaataatatccgggagagcattcacagattctattgtgagtcgtgttacacgatcgcgtcttccgttacaacttagacaagcgggtaaatgattattgcgagatgtgaaggtacccgaaccacacggcgtacatcgtgtgttagtcttgctatcgcataatctggaagcgtatgttcccggacacaaattatggcgtttgtattcgttgtctttacactttccatcggatggtgcatgcggtgctatatctcttccgtttattattatacatgagagaaacaatatatacgagtataatacggacttcatgatttaataatgtagtaatcgttgtcttgttcctgtttcctacttctccaatcatatagatattttctttctatcatggataatatttgtaatggttctttccgtacaacatactgtttagatgatattgcgcataatttccggaggcaaatacgatagtctagattgaccgatggtagactctaatttattgagtgctttgtcgacgagtttacttttacgctccatcgatagatggcactgttctatgagatcgtcgtacatgggaaatgaaatgtgactgtctgaatgtatggctttaagatagctgtgataccgtatacaggtcggtgtcggagattcgaatctctttgaggcgacttatgtcacgatgatggaatctatcttatcgaatgatatatttttcataaatacacttttatagtcctcgtttaaacagaatttactatgtagttccgcgaatgactcgtcccttaataggcagtaggctagtatcttttttacgtagtaatcgtcgtagggagagacatcttgtagaacaacgatttcgttttgttttctcttctgtaactgcttttctggatggccgtattgattatcgagcgtgatactcgctccatattccaataaccgctttgcaaattgtatattattgacatcgaccgcgtaatatagtagagttatcgatcatatctatatcatccatgtacttgcttagtatatcaaatacatctatcagtatggtttcataacagtgatacccgcaattattaaatctcgataatatcagaccgtacatacatagacggccattgttcgatacgtgatttacagccgcgtgtccatattttccacgataaaccttacgacgtttacatcgacgagattattattaacaaagtagtcgtgtagaggatagttgttgtccgttatctaacatgcatcgaacgaccatatcgccgtaatgtaagtagtttatcagtatggcttgtacgatggattcatcctgttgtctaaatctctttagaatgttatcgatgatgtagtggttatattctctggaatcgtacgaagtaatactacgcattacgtcgacaagagtatgacgtctctcaataagaagattaacgatttccatgtctacattatatggggttactctaaatcgcttgtttagataatacgcctctaatatagggctgacgtcgtatactctacacgtgtccacatcctttattaataataatttaacaatctctatatctatggttgagaaagaccagtagtattggatgggtaaagatcctccttcgtctctgccatggatggaaacattgttatcgatcaaacatttaattacatccttggatagagattgagattctctatgagacgatatatagtaatgaagagagttcttacacatatcactgtcgtacatacaggtacgaaatacgtaaccggtgctgtaacattctgatttaagaagccatagcaatacttctggtctcggattaggcgtcgttacgtatatatccaccaatccgagaccattgattgcataattcgtattcttggacggacgtatccgtttatccacaattaggtattttagcagacgtaagtcgatattatccgaatacagatcgaaatcatttatattcgacttgagttcgttagaggaatttgaatagctggatatcagtagatgcacaatctgagattttacgtatctatgcttactgtatactcctagcggagttaatccttcgttgtttctacaaagtctctcgactccgcgagagaacaatcttaatgtctgtatcgcatttattggagacgtaacaatgtagcgcattgtttcctcgtctatctatatgttttgataagttgtgacacgtttcaatttctagttttatttttttgtacgtcacatcttcatccagtagacgacatagaatagtgcactctctaccacaataatccatagctattctggtgctaattattcctatttcacgaaggcaatcattcctcataagatgataaaaagtgtagtggagatttagtatttagcagtgcggatatgatccaagagggtgagatagtcgttctcgttcagaatctttcgcagcataagtagtatgtcgatatacttatcgttgaagactctttataaaagtctatttgtttatatttattgcggatagcagtatttccctataaaaagtatacgtcctgtggtgtctttaatcatgtacatgaatggatggtttatgtagaccttcgtacgatataccatcgaaaagttaatcgtaaatactcctgtaacggccgatgcttctgtatactcctcattaacatctataaacgtcgtatgtagaaatttttctacagtgatagtttcattacacatcttgctaaaatctgcataatatccgaatatattagtaagtcctaaattttctaaaatcggtaccagattatacggttctgtcatttccactttaaactttggcatatacaagtctatacttttagtagataacataccacaccattttttaaatttttcatctgttatatttttttctatgttatatataccttctatgtcgtccggtagtataattaccatactagagtttccctcgtatggaatatcgataatagagaatcctccgaataattcattaatatgtacatattgcaagttattctcggtacccaccatcatatcaacgctggtaactatattcttagaaatataaaacttgtctgtatatgtaagatgtttagaaaatggatatttccacattgctttaaaatggacggcgctaacaactgtcatacgagtattaatggatagcggactagtcaataaggaattaattttaccatttgtcattgtcttaacccattcgttgattagttcctttgtttggttagcattattaaagtttacagtttgaaaatcgtcttttattttttgtaggaaggaggcgtggaactcgatactatcgctaccgtatattttatttgcggtagctagtgtcgcacaatacggaatatctacctccatgtcatcattattgtcatcgggtgtattctcattcatattctctatatattttgatagttgttcagctgtagaaccagctgctccatgatttagaatagataaagtagataaaatggaaactggagaaatcaaaacattttcatcagggtgttttaagattagttctttaaagatatccatggtatagacctaacgataacgatatatatcataaataaataatgttaaatttcaatttatgtttgtaccccgtattcatacttaacaaattggtattgcgtacacaatcaatcatattacataccattaataatgcaagcataaaaaattgttagtagatgtttctaaatataggttccgtaagcaaagaatataagaatgaagcggtaatgataaaatcaatcgttatctaaaatgatcatactcatttattttattctattatattaacacatacatttttaacagcaacacattcaatattgtattgttatttttatattatttacacaattaacaatatattattagtttatattactgaattaataatataaaattcccaatcttgtcataaacacacactgagaaacagcataaacacagaatccatcaaaaatgttgataaattatctgatgttgttgttcgctgctatgataatcagatcattcgccgatagtggtaacgctatcgaaacgacattgccagaaattacaaacgctacaacagatattccagctatcagattatgcggtccagagggagatggatattgtttacacggtgactgtatccacgctagagatattgacggtatgtattgtagatgctctcatggttatacaggcattagatgtcagcatgtagtattagtagactatcaacgttcagaaaacccaaacactacaacgtcatatatcccatctcccggtattatgcttgtattagtaggcattattatgtgttgtctattatctgtttataggttcactcgacgaactaaactacctatacaagatatggttgtgccataatttttataaatttttttatgagtatttttacaaaaatgtataaagtgtatgtcttatgtatatttataaaaatgctaagtatgcgatgtatctatgttatttgtatttatctaaacaatacctctacctctagatattatacaaaaattttttatttcggcatattaaagtaaaatctagttaccttgaaaatgaatacagtgggtggttccgtatcaccagtaagaacataatagtcaaatacagtatccgattgagattttgcatacaatactagtctagaaagaaatttgtaatcatcttctgtgacgggagtccatatatctgtatcatcgtctagtttatcagtgtcccatgctatattcctgttatcatcattagttaatgaaaataactctcgtgcttcagaaaagtcaaatattgtatccatacatacatctccaaaactatcgcttatacgtttatctttaacgatacctatacctagatggttatttactaacagacattttccagatctattgactataactcctatagtttccacatcaaccaagtaatgatcatctattgttatataacaataacataactcttttccatttttatcagtatgtatatctatatcaacgtcgtcgttgtagtgaatagtagtcattgatctattatatgaaacggatatgtctagaacggcaattgttttacgtccagttaacactttcgttgatttaaagtctagagtctttgcaaacataatatccttatccgactttatatttcctgtagggtggtataattttattttgcctccacatatcggtgtttccaaatatattactagacaatattccatatagttattagttaagggtacccaattagaacacgtacgcttattatcatcatttggatcgtatttcataaaagttattgtgttatcgatgtcaacacattctacattttttaatcgtctatatagtatttttctgatattttctataatatcagaattgtcttccatcggaagttgtatactatcggaatcagttacatgtttaaataattctctgatgtcattccttatacaatcaaattcattattaaacagtttaatagtctgtagacctttatcgtcgtaaatatccattgtcttattagttacgcttatttttatgtgtttttacgttgctttattatattttataagaatgattgtttgacgaatcacgagaactattaagacacattattaggtatatattataaaaaagtttttgattacgatgttataagaggaaagaggacacattaacatcatacatcaattaactacattcttataacatcgtaatcaaaagaattgcaattttgatgtataacaactgtcaatgggttatggaattgtatattacatattatacggtatgttggtaacgacaaataccggtcggtaattgtctgccggtgtaatagaattatatatatctatctattacaccggccttgtatacataataataagttgtggtagtatgatctccatatttataatttaggactttgtattcagtatttttggaatcataaaaaataaaaaaaagttttactaatttaaaatttaaaaagtatttacatttttttcactgtttagtcgcggatatggaattcgatcctgccaaaatcaatacatcatctatagatcatgtaacaatattacaatacatagatgaaccaaatgatataagactaacagtatgcattatccgaaatattatatcaatatcacaaaaataaatacacatttggctaatcaatttcgggcttggaaaaaacgtatcgccggaagggactatatgactaacttatctagagatacaggaatacaacaatcaaaacttactgaaactatacgtaactgtcaaaaaaatagaaacatatatggtctatatatacactacaatttagttattaattggataaccgatgtgattatcaatcaatattaagagggttggtaaattggtacatagctaataatacctatactccaaatacacccaataatacaacaaccatttctgagttggatatcatcaaaatactaaataaatacgaggacgtgtatagagtaagtaaagaaaaagaatgtggaatttgctatgaagttgtttactcaaaacgatagatactttggtttattggattcgtgtactcatatattttgcataacatgcatcaatatatggcatagaacacgaagagaaaccggtgcgtcggataattgtcctatatgccgtacccgttttagaaacataacaatgagcaagttctataagctagttaactaataaataaaaagtttaatttgttgacgacgtatgtcgttattttttctcgtataaaagattaatttgattctaatataatctttagtattggataaatatcaattcaaattaattccattagattatatcataaataaaaatagtagcacacaactacttcagcaaacattctttttataaatgccatctagcgtagcgaggacacaagtgaacctataattatcaaatttattagtatcagtcacatgaaggactttacgtagagtgacgattccactatctgtggtacgaacggtttcatcttctttgatgccatcacccagatgttctataaacttggtatcctcgtccgatttcatatcctttgccaaccaatacatatagctaaactcaggcatatgttccacacatcctgaacaatgaaattctccagaagatgttacaatgtctagatttggacatttggtttcaaccgcgttaacatatgagtgaacacacccatacatgaaagcgatgagaaataggattctcatcttgccaaaatatcactagaaaaaatttatttatcagttttaaaggtataaaaaatacttattgttgctcgaatattttgtatttgatggtatacggaagattagaaatgtaggtattatcatcaactgattctatggttttatgtattctatcatgtttcactattgcgttggaaataatatcatatgcttccacatatattttattttgttttaactcataatactcacgtaattctggattattggcatatctatgaataattttagctccatgatcagtaaatattaatgagaacatagtattaccacctaccattatttttttcatctcattcaattcttaattgcaaagatctatataatcattatagcgttgacttatggactctggaatcttagacgatgtacagtcatctataatcatggcatatttaatacattgttttatagcatagtcgttatctacgatgttagatatttctctcaatgaatcaatcacacaatctaatgtaggtttatgacataatagcattttcagcagttcaatgtttttagattcgttgatggcaatggctatacatgtatatccgttatttgatctaatgttgacatctgaaccggattctagcagtaaagatactagagattgtttattatatctaacagccttgtgaagaagtgtttctcctcgtttgtcaatcatgttaatgtctttaagataaggtaggcaaatgtttatagtactaagaattgggcaagcataagacatgtcacaaagacccttttttgtatgtataagtgtaaaaattataacatccatagttggatttacataggtgtccaatcgggatctctccatcatcgagataattgatggcatctcccttccttttttagtagatatttcatcgtgtaagaatcaatattaatatttctaaagtatccgtgtatagcctctttatttaccacagctccatattccactagagggatatcgccgaatgtcatatactcaattagtatatgttggaggacatccgagttcattgttttcaatatcaaagagatggtttccttatcatttctccatagtggtacaatactacacattattccgtgcggctttccattttccaaaaacaatttgaccaaatctaaatctacatctttattgtatctataatcactatttagataatcagccataattcctcgagtgcaacatgttagatcgtctatatatgaataagcagtgttatctattcctttcattaacaatttaacgatgtctatatctatatgagatgacttaatataatattgaagagctgtacaatagtttttatctataaaagacggcttgattccgtgattaattagacatttaacaacttccggacgcacatatgctctcgtatccgactctgaatacagatgagagatgatatacagatgcaatacggtaccgcaatttcgtagttgataatcatcatacgcgtatcagtactcgtcctcataaagaacactgcagccattttctatgaacaaatcaataattttagaaacaggatcattgtcattacataattttctataactgaacgatggttttcacatttaacactcaagtcaaatccatgttctaccaacacctttatcaagtcaacgtctacatttttggatttcatatagctgaatatattaaagttatttatgttgctaaatccagtggcttctagtagagccatcgctatatccttattaactttaacatgtctactatttgtgtattcttctaatggggtaagctgtctccaatttttgcgtaatggattagtgccactgtctagtagtagtttgacgacctcgacattattacaatgctcattaaaaaggtatgcgtgtaaagcattattcttgaattggttcctggtatcattaggatctctgtctttcaacatctgtttaagttcatcaagagccacctcctcattttccaaatagtcaaacattttgactgaatgagctactgtgaactctatacacccacacaactaatgtcattaaatatcatgtcaaaaacttgtacaattattaataaaaataatttagtgtttaaattttaccagttccagattttacacctccgttaatacctccattaaccccactggacgatcctcctccccacattccaccgccaccagatgtataagttttagatcctttattactaccatcatgtccatggataaagacactccacatgccgccactaccccctttagaagacatattaataagacttaaggacaagtttaacaataaaattaatcacgagtaccctactaccaacctacactattatatgattatagtttctatttttacagtaccttgactaaagtttctagtcacaagagcaatactaccaacctacactattatatgattatagtttctatttttataggaacgcgtacgagaaaatcaaatgtctaatttctaacggtagtgttgataaacgattgttatccgcggatacctcctctatcatgtcgtctattttcttactttgttctattaacttattagcattatatattatttgattataaaacttatattgcttattagcccaatctgtaaatatcggattattaacatatcgtttctttgtaggtttatttaacatgtacatcactgtaagcatgtccttaccatttattttaatttgacgcatatccgcaatttctttttcgcagtcggttataaattctatatatgatggatacatgctacatgtgtacttataatcgactaatatgaagtacttgatacatattttcagtaacgatttattattaccacctatgaataagtacctgtgatcgtctaggtaatcaactgttttcttaatacattcgatggttggtaatttactcagaataatttccaatatcttaatatataattctgctatttctgggatatatttatctgccagtataacacaaatagtaatacatgtaaacccatattttgttattatattaatgtctgcgccattatctattaaccattctactaggctgacactatgcgactcaatacaatgataaagtatactacatccatgtttatctattttgtttatatcatcaatatacggcttacaaagttttagtatcgataacacatccaactcacgcatagagaaggtagggaataatggcataatatttattaggttatcatcattgtcattatctacaactaagtttccattttttaaaatatactcgacaactttaggatctctattgccaaatttttgaaaatatttatttatatgcttaaatctatataatgtagctccttcatcaatcatacatttaataacattgatgtatactgtatgataagatacatattctaacaatagatcttgtatagaatctgtatatcttttaagaattgtggatattaggatattattacataaactattacacaattctaaaatataaaacgtatcacggtcgaataatagttgatcaactatataattatcgattttgtgatttttcttcctaaactgtttacgtaaatagttagatagaatattcattagttcatgaccactatagttactatcgaataacgcgtcaaatatttcccgtttaatatcgcatttgtcaagataataatagagtgtggtatgttcacgataagtataataacgcatctctttttcgtgtgaaattaaatagtttattacgtccaaagatgtagcataaccatcttgtgacctagtaataatataataatagagaactgttttacccattctatcatcataatcagtggtgtagtcgtaatcgtaatcgtctaattcatcatcccaattataatattcaccagcacgtctaatctgttctattttgatcttgtatccatactgtatgttgctacatgtaggtattcctttatccaataatagtttaaacacatctacattgggatttgatgttgtagcgtatttttctacaatattaataccatttttgatactatttatttctatacctttcgaaattagtaatttcaataagtctatattgatgttatcagaacatagatattcgaatatatcaaaatcattgatatttttatagtcgactgacgacaataacaaaatcacaacatcgtttttgatattattatttttcttggtaacgtatgcctttaatggagtttcaccatcatactcatataatggatttgcaccactttctatcaatgattgtgcactgctggcatcgatgttaaatgttttacaactatcatagagtatcttatcgttaaccatgattggttgttgatgctatcgcattttttggtttctttcatttcagttatgtatggatttagcacgtttgggaagcatgagctcatatgatttcagtactgtagtgtcagtactattagtttcaataagatcaatctctagatctatagaatcaaaacacgataggtcagaagataatgaatatctgtaggcttcttgttgtactgtaacttctggttttgttagatggttgcatcgtgctttaacgtcaatggtacaaattttatcctcgctttgtgtatcatattcgtccctactataaaattgtatattcagattatcatgcgatgtgtatacgctaacggtatcaataaacggagcacaccatttagtcataaccgtaatccaaaaatttttaaagtatatcttaacgaaagaagttgtgtcattgtctacggtgtatggtactagatcctcataagtgtatatatctagagtaatgtttaatttattaaatggttgataatatggatcctcgtgacaatttccgaagatggaaataagacataaacacgcaataaatctaattgcggacatggttactccttaaaaaaatacgaataatcaccttggctatttagtaagtgtcatttaacactatactcatattaatccatggactcataatctctatacgggattaacggatgttctatatacggggatgagtagttctcttctttaactttatactttttactaatcatatttagactgatgtatgggtaatagtgtttgaagagctcgttctcatcatcagaataaatcaatatctctgtttttttgttatacagatgtattacagcctcatatattacgtaatagaacgtgtcatctaccttattaactttcaccgcatagttgtttgcaaatacggttaatcctttgacctcgtcgatttccgaccaatctgggcgtataatgaatctaaactttaattgcttgtaatcattcgaaataatttttagtttgcatccgtagttatcccctttatgtaactgtaaatttctcaacgcgatatctccattaataatgatgtcgaattcgtgctgtatacccatactgaatggatgaacgaataccgacggcgttaatagtaatttactttttcatctttacatattgggtactagttttactatcataagtttataaattccacaagctactatggaataagccaaccatcttagtataccacacatgtcttaaagtttattaattaattacatgttgttttatatatatcgctacgaatttaaagagaaattagtttaggaagaaaaattatctatctacatcatcacgtctctgtattctacgatagagtgctactttaagatgcgacagatccgtgtcatcaaatatatactccattaaaatgattattccggcagcgaacttgatattggatatatcacaacctttgttaatatctacgacaatagacagcagtcccatggttccataaacagtgagtttatctttctttgaagagatattttgtagagatcttataaaactgtcgaatgacatcgcatttatatctttagctaaatcgtatatgttaccatcgtaatatctaaccgcgtctatcttaaacgtttccatcgctttaaagacgtttccgatagatggtctcatttcatcagtcatactgagccaacaaatataatcgtgtataacatctttgatagaatcagactctaaagaaaacgaatcggctttattatacgcattcatgataaacttaatgaaaaatgtttttcgttgtttaagttggatgaatagtatgtcttaataattgttattatttcattaattaatatttagtaacgagtacactctataaaaacgagaatgacataactaatcataactagttatcaaagtgtctaggacgcgtaattttcatatggtatagatcctgtaagcattgtctgtattctggagctattttctctatcgcattagtgagttcagaatatgttataaatttaaatcgaataacgaacataactttagtaaagtcgtctatattaactcttttattttctagccatcgtaataccatgtttaagatagtatattctctagttactacgatctcatcgttgtctagaatatcacatactgaatctacatccaattttagaaattggtctgtgttacatatctcttctatattattgttgatgtattgtcgtagaaaactattacgtagaccattttctttataaaacgaatatatagtactccaattatctttaccgatatatttgcacacataatccattctctcaatcactacatctttaagattttcgttgttaagatatttggctaaactatataattctattagatcatcaacagaatcagtatatatttttctagatccaaagacgaactctttggcgtcctctataatattcccagaaaagatattttcgtgttttagtttatcgagatctgatctgttcatatacgccatgattgtacggtacgttatgataaccgcataaaataaaaatccattttcatttttaaccaatactattcataattgagattgatgtaatactttgttactttgaacgtaaagacagtacacggatccgtatctccaacaagcacgtagtaatcaaatttggtgttgttaaacttcgcaatattcatcaatttagatagaaacttatactcatcatctgttttaggaatccatgtattattaccactttccaacttatcattatcccaggctatgtttcgtccatcatcgttgcgcagagtgaataattcttttgtattcggtagttcaaatatatgatccatgcatagatcggcaaagctattgtagatgtgatttttcctaaatctaatataaaactcgtttactagcaaacactttcctgatttatcgaccaagacacatatggtttctaaatctatcaagtggtggggatccatagttatgacgcagtaacatatattattacattcttgactgtcgctaatatctaaatatttattgttatcgtattggattctgcatatagatggcttgtatgtcaaagatatagaacacataaccaatttatagtcgcgctttacattctcgaatctaaagttaagagatttagaaaacattatatcctcggatgatgttatcactgtttctggagtaggatatattaaagtctttacagatttcgtccgattcaaataaatcactaaataatatcccacattatcatctgttagagtagtatcattaaatctattatattttatgaaagatatatcactgctcacctctatatttcgtacatttttaaactgtttgtataatatctctctgatacaatcagatatatctattgtgtcggtagacgataccgttacatttgaattaatggtgttccattttacaacttttaacaagttgaccaattcatttctaatagtatcaaactctccatgattaaatattttaatagtatccattttatatcactacggacacaaagtagctgacataaaccattgtataatttttatgttttatgtttattagcgtacacattttggaagttccggcttccatgtatttcctggagagcaagtagatgatgaggaaccagatagtttatatccgtacttgcacttaaagtctacattgtcgttgtatgagtatgatcttttaaacccgctagacaagtatccgtttgatattgtaggatgtggacatttaacaatctgacacgtgggtggatcggaccattctcctcctgaacacaggacactagagttaccaatcaacgaatatccactattgcaactataagttacaacgctcccatcggtataaaaatcctcgtatccgttatgtcttccgttggatatagatggaggggattggcatttaacagattcacaaataggtgcctcgggattccataccatagatccagtagatcctaattcacaatacgatttagattcaccgatcaactgatatccgctattacaagagtacgttatactagagccaaagtctactccaccaatatcaagttggccattatcgatatctcgaggcgatgggcatctccgtttaatacattgattaaagagtgtccatccagtacctgtacatttagcatatataggtcccattttttgctttctgtatccaggtagacatagatattctatagtgtctcctatgttgtaattagcattagcatcagtctccacactattcttaaatttcatattaatgggtcgtgacggaatagtacagcatgatagaacgcatcctattcccaacaatgtcaggaacgtcacgctctccaccttcatatttatttatccgtaaaaatgttatcctggacatcgtacaaataataaaaagcccatatatgttcgctattgtagaaattgtttttcacagttgctcaaaaacgatggcagtgacttatgagttacgttacactttggagtctcatctttagtaaacatatcataatattcgatattacgagttgacatatcgaacaaattccaagtatttgattttggataatattcgtattttgcatctgctataattaagatataatcaccgcaagaacacacgaacatctttcctacatggttaaagtacatgtacaattctatccatttgtcttccttaactatatatttgtatagataattacgagtctcgtgagtaattccagtaattacatagatgtcgccgtcgtactctacagcataaactatactatgatgtctaggcatgggagacttttttatccaacgatttttagtgaaacattccacatcgtttaatactacatatttctcatacgtggtataaactccacccattacatatatatcatcgtttacgaataccgacgcgcctgaatatctaggagtaattaagtttggaagtcttatccatttcgaagtgccgtgtttcaaatattctgccacacccgttgaaatagaaaattctaatcctcctattacatataactttccatcgttaacacaagtactaacttctgattttaacgacgacatattagtaaccgttttccattttttcgttttaagatctacccgcgatacggaataaacatgtctattgttaatcatgccgccaataatgtatagacaattatgtaaaacatttgcattatagaattgtctatctgtattaccgactatcgtccaatattctgttctaggagagtaatgggttattgtggatatataatcagagtttttaatgactactatattatgttttataccatttcgtgtcactggctttgtagatttggatatagttaatcccaacaatgatatagcattgcgcatagtattagtcataaacttgggatgtaaaatgttgatgatatctacatcgtttggatttttatgtatccactttaataatatcatagctgtaacatcctcatgatttacgttaacgtcttcgtgggataagatagttgtcagttcatcctttgataattttccaaattctggatcggatgtcaccgcagtaatattgttgattatttctgacatcgacgcattatatagttttttaattccatatcttttagaaaagttaaacatccttatacaatttgtgaaattaatattatgaatcatagtttttacacatagatctactacaggcggaacatcaattattatggcagcaactagtatcatttctacattgtttatggtgatgtttatcttcttccagcgcatatagtctaatagcgattcaaacgcgtgatagtttataccattcaatataatcgcttcatcctttagatggtgatcctgaatgcgtttaaaaaaattatacggagacgccgtaataatttccttattcacttgtataatttccccattgatagaaaatattacgctttccattcttaaagtactataagtaattatagtataatgtaaacgtttatatattcaatatttttataaaaatcattttgacattaattcctttttaaatttccgtctatcatctatagaaacgtattctatgaatttataaaatgcttttacgtgtcctatcgtaggcgatagaaccgctaaaaagcctatcgaatttctacaaaagaatctgttatatggtatagggagagtataaaacattaaatgtccgtacttattaaagtattcagtagccaatcctaactctttcgaatacttattaatggctcttgttctgtacgaatctatttttttgaacaacggacctagtggtatatcttgttctatgtatctaaaataatgtctgactagatccgttagtttaatatccgcagtcatcttgtctagaatggcaaatctaactgcgggtttaggctttagtttagtttctatatctacatctatgtctttatctaacaccaaaaatataatagctaatattttattacaatcatccggatattcttctacgatctcactaactaatgtttctttggttatactagtatagtcactatcggacaaataaagaaaatcagatgatcgatgaataatacatttaaattcatcatctgtaagatttttgagatgtctcattagaatattattagggttagtactcattatcattcggcagctattacttattttattatttttcaccatatagatcaatcattagatcatcaaaatatgtttcaatcatcctaaagagtatggtgaatgactcttcccatctaatttctgaacgttcaccaatgtctctagccactttggcactaatagcgatcattcgcttagcgtcttctatattattaactggttgatttaatctatctagcaatggaccgtcggacagcgtcattctcatgttcttaatcaatgtacatacatcgccgtcatctaccaattcatccaacaacataagctttttaaaatcatcattataataggtttgatcgttgtcatttctccaaagaatatatctaataagtagagtcctcatgcttagttaacaactattttttatgttaaatcaattagtacaccgctatgtttaatacttattcatattttagtttttaggattgagaatcaatacaaaaattaatgcatcattaattttagaaatacttagtttccacgtagtcaatgaaacatttgaactcatcgtacaggacgttctcgtacaggacgtaactataaaccggtttatatttgttcaagatagatacaaatccgataactttttttacgaattctacgggatccactttaaaagtgtcataccgggttctttttatttttttaaacagatcaatggtgtgatgttgattaggtcttttacgaatttgatatagaatagcgtttacatattctccataatggtcaatcgccatttgttcgtatgtcataaattctttaattatatgacactgtgtattatttagttcatccttgttcattgttaggaatctatccaaaatggcaattatactagaactataggtgcgttgtatacacatattgatgtgtctgtttatacaatccatgatatttggatccatgctactaccttcgggtaaaattgtagcatcatataccatttctagtactttaggttcattattatccattgcagaggacgtcatgatcgaatcataaaaaaatatattatttttatgttattttgttaaaaataatcatcgaatacttcgtaagatactccttcatgaacataatcagttacaaaacgtttatatgaagtaaagtatctacgatttttacaaaagtccggatgcataagtacaaagtacgcgataaacggaataataatagatttatctagtctatctttttctatagctttcatagttagatacatggtctcagaagtaggattatgtaacatcagcttcgataaaatgactgggttatttagtcttacacattcgctcatacatgtatgaccgttaactacagagtctacactaaaatgattgaacaatagatagtctaccattgtttcgtattcagatagtacagcgtagtacatggcatcttcacaaattatatcattgtctaatagatatttgacgcatcttatggatcccacttcaacagccatcttaaaatcatattgctttcctttatcattaataatttctagaacatcatctctatcataaaagatacaaatattaactgtttgatccgtaataacattgctagtcaatagcaatttgttaataagatgcgctgggctcaatgtcttaataagaagtgtaagaggactatctccgaatttgttttgtttattaacatccgttgatggaagtaaaagatctataatgtctacattcttgactgttttagagcatacaatatggagaggtgtatttccatcatgatctggttttgagggactaattcctagtttcatcatccatgagattgtagaagcttttggattgtctgacataagatgtctatgaatatgatttttgccaaatttatccactatcctggcttcgaatccgatggacattatttttttaaacactctttctgaaggatctgtacacgccaacaacggaccacatccttcttcatcaaccgagttgttaatcttggctccatactgtaccaataaatttattctctctatgacttcatcatctgttcccgagagataatatagaggtgttttatgctgtttatcacacgcgtttggatctgcgccgtgcgtcagcagcatcgcgactattctattattattaattttagaagctatatgcaatggataatttccatcatcatccgtctcatttggagagtatcctctatgaagaagttcttcgacaaatcgttcatctagtcctttaattccacaatacgcatgtagaatgtgataattatttccagaaggttcgatagcttgtagcatattcctaaatacatctaaatttttactattatatttggcataaagagatagataatactcggccgacataatgttgtccattgtagtataaaaattaatatttctatttctatttctgtatatttgcaacaatttactctctataacaaatatcataacttagtttttttatgtcaagaaggcactggtttagttcatctataaatgtcacgccataactaccacgcatgccatactcagaattatgataaagatatttatccttggggtgtaggtaatggggattaatctttgttggatcagtctctaagttaacacatgtcacacatgatccatttatagttatatcacacgatgatgatttatgaattgattccggaagatcgctatcgtattttgtggttccacaattcatttccatacatgttattgtcacactaatattatgatgaactttatctagccgctgagtggtaaacaacagaacagatagtttattatctttaccaacaccctcagccgctgccacaaatctctgatccgtatccatgatggtcatgtttatttctagtccgtatccagtcaacactatgttagcatttctgtcgatatagctttcactcatatgacactcaccaataatagtagaattaatgtcgtaatttacaccaatagtgagttcggcggcaaagtaccaataccggtaatcttgtcgaggaggacatatagtattcttgtattctaccgaatacccgagagatgcgatacaaaagagcaagactaatttgtaaaccatcttactcaaaatatgtaacaatagtacgatgcaatgagtaagacaataggaaatctatcttatatacacataattattctatcaattttaccaattagttagtgtaatgttaacaaaaatgtgggagaatctaattagtttttctttacacaattgacgtacatgagtctgagttccttgtttttgctaattatttcatccaatttattattcttgacgatatcgagatcttttgtataggagtcaaacttgtattcaacatgcttttctataatcattttagctatttcggcatcatccaatagtacattttccagattagcagaatagatattaatgtcgtatttgaacagagcctgtaacatctcaatgtctttattatctatagccaatttaatgtccggaatgaagagaagggaattattggtgtttgtcgacgtcatatagtcgagcaagagaatcatcatatccacgtgtccattttttatagtgatgtgaatacaactaaggagaatagccagatcaaaagtagatggtatctctgaaagaaagtaggaaacaatacttacatcattaagcatgacggcatgataaaatgaagttttccatccagttttcccatagaacatcagtctccaatttttcttaacaaacagttttaccgtttgcatgttaccactatcaaccgcataatacaatgcggtgtttcccttgtcatcaaattgtgaatcatccagtccactgaatagcaaaatctttactattttggtatcttccaatgtggctgcctgatgtaatggaaattcattctctagaagatttttcaatgctccagcgttcaacaacgtacatactagacgcacgttattatcagctattgcataatacaaggcactatgtccatggacatccgccttaaatgtatctttactagagagaaagcttttcagctgcttagacttccaagtattaattcgtgacagatccatgtctgaaacgagacgctaattagtgtatattttttcattttttataattttgtcatattgcaccagaattaataatatctttaatagatctgattagtagatacatggctatcgcaaaacaacatatacacatttaataaaaataatatttattaagaaaattcagatttcacgtacccatcaatataaataaaataatgattccttacaccgtacccatattaaggagattccaccttacccataaacaatataaatccagtaatatcatgtctgatgatgaacacaaatggtgtattaaattccagtttttcaggagatgatctcgccgtagctaccataatagtagatgcctctgctacagttccttgttcgtcgacatctatctttgcattctgaaacattttataaatatataatgggtccctagtcatatgtttaaacgacgcattatctggattaaacatactaggagccatcatttcggctatcgacttaatatccctcttattttcgatagaaaatttagggagtttaagattgtacactttattccctaattgagacgaccaatagtctaattttgcagccgtgatagaatctgtgaaatgggtcatattatcacctattgccaggtacatactaatattagcatccttatacggaaggcgtaccatgtcatattctttgtcatcgattgtgattgtatttccttgcaatttagtaactacgttcatcatgggaaccgttttcgtaccgtacttattagtaaaactagcattgcgtgttttagtgatatcaaacggatattgccatatacctttaaaatatatagtattaatgattgcccatagagtattattgtcgagcatattagaatctactacattagacataccggatctacgttctactatagaattaattttattaaccgcatctcgtctaaagtttaatctatataggccgaatctatgatattgttgataatacgacggtttaatgcacacagtattatctacgaaactttgataagttagatcagtgtacgtatatttagatgttttcagcttagctaatcctgatattaattctgtaaatgctggacccagatctctttttctcaaatccatagtcttcaataattctattctagtattacctgatgcaggcaatagcgacataaacatagaaaacgaataaccaaacggtgagaagacaatattatcatcttgaatatttttatacgctactataccggcattggtaaatccttgtagacgataggcggacgctgaacacgctaacgatagtatcaataacgcaatcatgattttatggtattaataattaaccttatttttatgttcggtataaaaaaattattgatgtctacacatccttttgtaattgacatctatatatccttttgtataatcaactctaatcactttaacttttacagttttccctaccagtttatccctatattcaacatatctatccatatgcatcttaacactctctgccaagatagcttcagagtgaggatagtcaaaaagataaatatatagagcataatcattctcgtatactctgccctttattacatcacccgcattgggcaacgaataacaaaatgcaagcatcttgttaacgggctcgtaaattgggataaaaattatgtttttattgtcttatatctattttattcaagagaatattcaggaatttctttttccggttgtatctcgtcgcagtatatatcatttgtacattgtttcatattttttaatagtttacaccttttagtaggactagtatcgtacaattcatagctgtattttgaattccaatcacgcataaaaatatcttccaattgttgacgaagacctaatccatcatccggtgtaatattaatagatgctccacatgtatccgtaaagtaatttcctgtccaatttgaggtacctatataggccgttttatcggttaccatatatttggcatggtttaccctagaatacggaatgggaggatcagcatctggtacaataaatagctttacttctatatttatgtttttagattttagcatagcgatagatcttaaaaagtttctcatgataaacgaagatcgttgccagcaactaatcaatagcttaacggatacttgtctgtctatagcggatcttcttaattcatcttctatataaggccaaaacaaaattttacccgccttcgaataaataatagggataaagttcataacagatacataaacgaatttactcgcatttctaatacatgacaataaagcggttaaatcattggttctttccatagtacatagttgttgcggtgcagaagcaataaatacagagtgtggaacgccgcttacgttaatactaagaggatgatctgtattataatacgacggataaaagtttttccaattatatggtagattgttaactccaagataccagtatacctcaaaaatttgagtgagatccgctgccaagttcctattattgaagatcgcaatacccaattccttgacctgagttagtgatctccaatccatgttagcgcttcctaaataaatatgtgtattatcagatatccaaaattttgtatgaagaactcctcctaggatatttgtaatatctatgtatcgtacttcaactccggccatttgtagtctttcaacatcctttaatggtttgttagatttattaacggctactctaactcgtactcctcttttgggtaattgtacaatctcgtttaatattatcgtgccgaaattcgtacccacttcatccgataaactccaataaaaagatgatatatctagtgtttttgtggtattggatagaatttccctccacatgttaaatgtagacaaatatactttatcaaattgcatacctataggaatagtttctgtaatcactgcgattgtattatccggattcattttatttgttaaaagaataatcctatatcacttcactctattaaaaatccaagtttctatttctttcatgactgattttttaacttcatccgtttccttatgaagatgatgtttggcaccttcataaatttttatttctctattacaatttgcatgttgcatgaaataatatgcacctaaaacatcgctaatcttattgtttgttccctggagtatgagagtcggggggtgttaatcttggaaattatttttctaaccttgttggtagccttcaagacctgactagcaaatccagccttaattttttcatgattgactaatgggtcgtattggtatttataaactttatccatatctctagatactgattctggacatagctttccgactggcgcatttggtgtgatggttcccataagtttggcagctagcagattcagtcttgaaacagcatctgcattaactagaggagacattagaatcattgctgtaaacaagtttggattatcgtaagaggctagctcccatggaatgacccaataagtagatttaatagttaccacgtgctgtaccaaagtcatcaatcatcattttttcaccattacttcttccatgtccaatatgatcatgtgagaatactaaaattcctaacgatgatatgttttcagctagttcgtcataacgtccagaatgtttaccagctccatgacttatgaatactaatgccttaggatatgtaataggtttccaatatttacaatatatgtaatcattgtccagattgaacatacagtttgcactcatgattcacgttatataactatcaatattaacagttcgtttgatgatcatattatttttatgttttattgataattgtaaaaacatacaattaaatcaatatagaggaaggagacggctactgtcttttgtaagatagtcatggcgactaaattagattatgaggatgctgttttttactttgtggatgatgataaaatatgtagtcgcgactccatcatcgatctaatagatgaatatattacgtggagaaatcatgttatagtgtttaacaaagatattaccagttgtggaagactgtacaaggaattgatgaagttcgatgatgtcgctatacggtactatggtattgataaaattaatgagattgtcgaagctatgagcgaaggagaccactacatcaattttacaaaagtccatgatcaggaaagtttattcgctaccataggaatatgtgctaaaatcactgaacattggggatacaaaaagatttcagaatctagattccaatcattgggaaacattacagatttgatgaccgacgataatataaacatcttgatactttttctagaaaaaaaattgaattgatgatataggggtcttcataacgcataattattacgttagcattctatatccgtgttaaaaaaaattatcctatcatgtatttgagagttttatatgtagcaaacatgatagctgtgatgccaataagctttagatattcacgcgtgctagtgttagggatggtattatctggtggtgaaatgtccgttatataatctacaaaacaatcatcgcatatagtatgcgatagtagagtaaacatttttatagtttttactggattcatacatcgtctacccaattcggttataaatgaaattgtcgccaatcttacacccaaccccttgttatccattagcatagtattaacttcgttatttatgtcataaactgtaaatgattttgtagatgccatatcatacatgatattcatgtccctattataatcattactaactttatcacaatatatgttgataatatctatatatgatctagtctttgtgggcaactgtctatacaagtcgtctaaacgttgtttactcatatagtatcgaacagccatcattacatggtcccgttccgttgatagataatcgagtatgttagtggacttgtcaaatctatataccatattttctggaagtggatatacatagtcgtgatcaacattattgctagcctcatcttctatatcctgtactataccattatctatatcatctacataatctatgatattattacacataaacatcgacaacatactattgtttattatctaagtcctgttgatccaaacccttgatctcctctatttgtactatctagagattgtacttcttccagttctggataatatatacgttgatagattagctgagctattctatctccagtatttacattaaacgtacattttccattattaataagaatgactcctatgtttcccctataatcttcgtctattacaccacctcctatatcaatgccttttagtgacagaccagacctaggagctattctaccatagcagaacttaggcatggacatactaatatctgtcttaattaactgtctttctcctggagggatagtataatcgtaagcgctatacaaatcatatccggcagcacccggcgattgcctagtaggagatttagctctgttagtttccttaacaaatctaactggtgagttaatattcatgttgaacataaaactaatattttatttcaaaattatttaccatcccatatattccatgaataagtgtgatgattgtacacttctatagtatctatatacgatccacgataaaatcctcctatcaatagcagtttattatccactatgatcaattctggattatccctcggataaataggatcatctatcagagtccatgtattgctggattcacaataaaattccgcatttctaccaaccaagaataaccttctaccgaacactaacgcgcatgatttataatgaggataataagtggatggtccaaactgccactgatcatgattgggtagcaaatattctgtagttgtatcagtttcagaatgtcctcccattacgtatataacattgtttatggatgccactgctggattacatctaggtttcagaagactcggcatattaacccaagcagcatccccgtggaaccaacgctcaacagatgtgggatttggtagacctcctactacgtataatttattgttagcgggtatcccgctagcatacagtctggggctattcatcggaggaattggaatccaattgtttgatatataatttacagctatagcattgttatgtatttcattgttcatccatccaccgatgagatatactacttctccaacatgagtacttgtacacatatggaatatatctataatttgatccatgttcataggatactctatgaatggatacttgtatgatttgcgtggttgtttatcacaatgaaatattttggtacagtctagtatccattttacattatttatacctctgggagaaagataatttgacctgattacatttttgataaggagtagcagatttcctaatttatttcttcgcctcatataccacttaatgacaaaatcaactacataatcctcatctggaacatttagttcatcgctttctagaataagtttcatagatagataatcaaaattgtctatgatgtcatcttccagttccaaaaagtgtttggcaataaagtttttagtatgacataagagattggatagtccgtattctatacccatcatgtaacactcgacacaatattcctttctaaaatctcgtaagataaagtttatacaagtgtagatgataaattctacagaggttaatatagaagcacgtaataaattgacgacgttatgactatctatatatacctttccagtatatgagtaaataactatagaagttaaactgtgaatgtcaaggtctagacaaacccttgtaactggatctttatttttcgtgtatttttgacgtaaatgtgtgcgaaagtaaggagataactttttcaatatcgtagaattgactattatattgcctcctatggcatcaataattgttttgaatttcttagtcatagacaatgctaatatattcttacagtacacagtattgacaaatatcggcatttatgtttctttaaaagtcaacatctagagaaaaatgattatctttttgagacataactcccattttttggtattcacccacacgtttttcgaaaaaattagtttttccttccaatgatatattttccatgaaatcaaacggattggtaacattataaatttttttaaatcccaattcagaaatcaatctatccgcgacgaattctatatatgttttcatcatttcacaattcattcctataagtttaactggaagagccgcagtaagaaattcttgttcaatggatactgcatctgttataatagatctaacggtttcttcactcggtggatgcaataaatgtttaaacatcaaacatgcgaaatcgcagtgcagaccctcgtctctactaattagttcgttggaaaacgtgagtccgggcattaggccacgctttttaagccaaaatatggaagcgaatgatccagaaaagaaaattccttctactgcagcaaaggcaataagtctctctccataaccggcgctgtcatgtatccacttttgagcccaatcggccttcttttttacacaaggcatcgtttctatggcattaaagagatagtttttttcattactatctttaacataagtatcgatcaaaagactatacatttccgaatgaatgttttcaatggccatctgaaatccgtagaaacatctagcctcggtaatctgtacttctgtacaaaatcgttccgccaaattttcattcactattccgtcactggctgcaaaaaacgccaatacatgttttataaaatatttttcgtctggtgttagtttattccaatcattgatatctttagatatatctacttcttccactgtccaaaatgatgcctctgcctttttatacatgttccagatgtcatgatattggattgggaaaataacaaatctatttggatttggtgcaaggatgggttccataactaaattaacaataacaataaattttttttcagttatctatatgcctgtacttggattttttgtacatcgatatcgccgcaatcactacaataattacaagtattattgatagcattgttattagtactatcataattaaattatctacattcatgggtgctgaataatcgttattatcatcattatcattttgtaattgtgacatcatactagataaatcgtttgcgagattgttgtgggaagcgggcatggaggatgcattatcattattatttaacgccttccatttggattcacaaatgttacgcacattcaacattttatggaaactataattttgtgaaaacaaataacaagaaaactcgtcatcgttcaaatttttaacgatagtaaaccgattaaacgtcgagctaatttctaacgctagcgactctgttggatatgggtttccagatatatatcttttcagttcccctacgtatctataatcatctgtaggaaatggaagatatttccatttatctactgttcctaatatcatatgtggtggtgtagtagaaccattaagcgcgaaagatgttatttcgcatcgtattttaacttcgcaataatttctggttagataacgcactctaccagtcaagtcaatgatattagcctttacagatatattcatagtagtcgtaacgatgactccatcttttagatgcgatactcctttgtatgtaccagaatcttcgtacctcaaactcgatatatttaaacaagttaatgagatattaacgcgttttatgaatgatgatatataaccagaagttttatcctcggtggctagcgctataaccttatcattataataccaactagtgtgattaatatgtgacacgtcagtgtgggtacaaatatgtacattatcgtctacgtcgtattcgatacatccgcatacagccaacaaatataaaatgacaaatactctaacgccgttcgtacccatcttgatgcggtttaataaatgttttgatttcaatttattgtaaaaaaagattcggttttatactgttcgatattctcattgcttatattttcatctatcatctccacacagtcaaatccgtggttagcatgcacctcatcaaccggtaaaagactatcggactcttctatcattataactctagaatatttaatttggtcattattaatcaagtcaattatcttatttttaacaaacgtgagtattttactcattttttataaaaacttttagaaatatacagactctatcgtgtgtctatatcttctttttatatccaatgtatttatgtctgatttttcttcatttatcatatataatggtccaaattctacacgtgcttcggattcatccagatcattaaggttcttataattgtaacatccttctcttccctcttctacatcttccttcttattcttattcttagcgtcacagaatctaccacagcaggatcccatgacgagcgtcatattaaactaatccattttcaattataatatatgattagtaatgaccattaaaataaaaaatattcttcataaccggcaagaaagtgaaaagttcacattgaaactatgtcagtagtatacatcatgaaatgatgatatatatatactctattttggtggaggattatatgatataattcgtggataatcatttttaagacacatttctttattcgtaaatcttttcacgttaaatgagtgtccatattttgcaatttcttcatatgatggcggtgtacgtggacgaggctgctcctgttcttgttgtggtcgccgactgtcgtgtctgcgtttagatccctccattatcgcgattgcgtagatggagtactattttataccttgtaattaaatttttttattaattaaacgtataaaaacgttccgtatctgtatttaagagccagatttcgtctaatagaacaaatagctacagtaaaaataactagaataattgctacacccactagaaaccacggatcgtaatacggcaatcggttttcgataataggtggaacgtatattttatttaaggacttaacaattgtctgtaaaccacaatttgcttccgcggatcctgtattaactatctgtaaaagcatatgttgaccgggcggagccgaacattctccgatatctaatttctgtatatctataatattattaacctccgcatacgcattacagttcttttctagcttggataccgcactaggtacatcgtctagatctattcctatttcctcagcgatagctcttctatccttttccggaagcaatgaaatcacttcaataaatgattcaaccatgagtgtgaaactaagtcgagaattactcatgcatttgttagttattcggagcgcgcaatttttaaactgtcctataacctctcctatatgaatagcacaagtgacattagtagggatagaatgttgagctaatttttgtaaataactatctataaaaagattatacaaagttttaaactctttagtttccgccatttatccagtctgagaaaatgtctctcataataaatttttccaagaaactaattgggtgaagaatggaaacctttaatctatatttatcacagtctgttttggtacacatgatgaattcttccaatgccgtactaaattcgatatctttttcgatttctggatatgtttttaataaagtatgaacaaagaaatggaaatcgtaataccagttatgtttaactttgaaattgttttttattttcttgttaatgattccagccacttgggaaaagtcaaagtcgtttaatgccgatttaatacgttcattaaaaacaaactttttatcctttagatgaattattattggttcattggaatcaaaaagtaagatattatcgggtttaagatctgcgtgtaaaaagttgtcgcaacagggtagttcgtagattttaatgtataacagagccatctgtaaaaagataaactttatgtattgtaccaaagatttaaatcctaatttgatagctaactcggtatctactttatctgccgaatacagtgctaggggaaaaattataatgtttcctctttcatattcgtagttagttctcttttcatgttcgaaaaagtgaaacatgcggttaaaatagtttataacattaatattactgttaataactgccggataaaagtgggatagtaatttcacgaatttgatactgtcctttctctcgttaaacgcctttaaaaaaactttagaagaatatctcaatgagagttcctgaccatccatagtttgtatcaataatagcaacatatgaagaacacgtttatacagagtatgtaaaaatgttaatttatagtttaatcccatggcccacgcacacacgattaattttttttcatctccctttagattgttgtatagaaatttgggtactgtgaactccgccgtagtttccatgggactatataattttgtggcctcgaatacaaattttactacatagttatctatcttaaagactataccatatcctcctgtagatatgtgataaaaatcgtcgtttataggataaaatcgtttatccttttgttggaaaaaggatgaattaatgtaatcattctcttctatctttagtagtgtttccttattaaaattcttaaaataatttaacaatctaactgacggagcccaattttggtgtaaatctaattgggacattatattgttaaaatacaaacagtctcctaatataacagtatctgataatctatggggagacatccattgatattcaggggatgaatcattggcaacacccatttattgtacaaaaagccccaatttacaaacgaaagtccaggtttgatagagacaaacaattaactattttgtctctgtttttaacacctccacagtttttaatttctttagtaatgaaattattcacaatatcagtatcttctttatctaccagagattttactaacttgataaccttggctgtctcattcaatagggtagtaatatttgtatgtgtgatattgatatctttttgaattgtttcttttagaagtgattctttgatggtgccagcatacgaattacaataatgcagaaactcggttaacatgcaggaattatagtaagccaattccaattgttgcctgtgttgtattagagtgtcaatatgagcaatggtgtccttgcgtttctctgatagaatgcgagcagcgattttggcgttatcatttgacgatatttctggaatgacgaatcctgtttctactaactttttggtaggacaaagtgaaacaatcaagaagatagcttctcctcctatttgtggaagaaattgaactcctctagatgatctactgacgatagtatctccttgacagatattggaccgaattacagaagtacctggaatgtaaagccctgaaaccccctcattttttaagcagattgttgccgtaaatcctgcactatgcccaagatagagagctcctttggtgaatccatctctatgtttcagtttaaccaagaaacagtcagctggtctaaaatttccatctctatctaatacagcatctaacttgatgtcaggaactatgaccggtttaatgttatatgtaacattgagtaaatccttaagttcataatcatcactgtcatcagttatgtacgatccaaacaatgtttctaccggcatagtggatacgaagatgctatccatcagaatgtttccctgattagtattttctatatagctattcttctttaaacgattttccaaatcagtaactatgttcatttttttaggagtaggacgcctagccagtatggaagaggattttctagatcctctcttcaacatctttgatctcgatggaatgcaaaaccccatagtgaaacaaccaacgataaaaataatattgtttttcactttttataattttaccatctgactcatggattcattaatatctttataagagctactaacgtataattctttataactgaactgagatatatacaccggatctatggtttccataattgagtaaatgaatgctcggcaataactaatggcaaatgtatagaacaacgaaattatactagagttgttaaagttaatattttctatgagctgttccaataaattatttgttgtgactgcgttcaagtcataaatcatcttgatactatccagtaaaccgtttttaagttctggaatattatcatcccattgtaaagcccctaattcgactatcgaatatcctgctctgatagcagtttcaatatcgacggacgtcaatactgtaataaaggtggtagtattgtcatcatcgtgataaactacgggaatatggtcgttagtaggtacggtaactttacacaacgcgatatataactttccttttgtaccatttttaacgtagttgggacgtcctgcagggtattgttttgaagaaatgatatcgagaacagatttgatacgatatttgttggattcctgattattcactataatataatctagacagatagatgattcgataaatagagaaggtatatcgttggtaggataatacatccccattccagtattctcggatactctattgatgacactagttaagaacatgtcttctattctagaaaacgaaaacatcctacatggactcattaaaacttctaacgctcctgattgtgtctcgaatgcctcgtacaaggatttcaaggatgccatagattctttgaccaacgatttagaattgcgtttagcatctgatttttttattaaatcgaatggtcggctctctggtttgctaccccaatgataacaatagtcttgtaaagataaaccgcaagaaaatttatacgcatccatccaaataaccctagcaccatcggatgatattaatgtattattatagattttccatccacaattattgggccagtatactgttagcaacggtatatcgaatagattactcatgtaacctactagaatgatagttcgtgtactagtcataatatctttaatccaatctaaaaaatttaaaattagattttttacactgttaaagttaacaaaagtattacccgggtacgtggatatcatatatggcattggtccattatcagtaatagctccataaactgatacggcgatggtttttatatgtgtttgatctaacgaggaagaaattcgcgcccacaattcatctctagatatgtatttaatatcaaacggtaacacatcaatttcgggacgcgtatatgtttctaaatttttaatccaaatataatgatgacctatatgccctattatcatactgtcaactatagtacacctagggaacttacgatacatctgtttcctataatcgttaaattttacaaatctataacatgctaaaccttttgacgacagccattcattaatttctgatatggaatctgtattctcgataccgtatcgttctaaagccagtgctatatctccctgttcgtgggaacgctttcgtataatatcgatcaacggataatctgaagtttttggagaataatatgactcatgatctatttcgtccataaacaatctagacataggaattggaggcgatgatcttaattttgtgcaatgagtcgtcaatcctataacttctaatcttgtaatattcatcatcgacataatactatctatgttatcatcgtatattagtataccatgaccttcttcatttcgtgccaaaatgatatacagtcttaaatagttacgcaatatctcaatagtttcataattgttagctgttttcatcaaggtttgtatcctgtttaacatgatggcgttctataacgtctctattttctatttttaattttttaaatttttaacgatttactgtggctagatacccaatctctctcaaatatttttttagcctcgcttacaagctgtttatctatactattaaaactgacgaatccgtgattttggtaatgggttccgtcgaaatttgccgaagtgatatgaacatattcgtcgtcgactatcaacaattttgtattattctgaatagtgaaaaccttcacagatagatcattttgaacacacaacgcatctagacttttggcggttgccatagaatatacgtcgttcttatcccaattaccaactagaagtctgatcttaactcctctattaatggctgcttctataatggagttgtaaatgtcgggccaatagtagctattaccgtcgacacgtgtagtgggaactatggccaaatgttcaatatctatactagtcttagctgacctgagtttatcaataactacatcggtatctagatctctagaatatcccaataggtgttccggagaatcagtaaagaacactccacctataggattcttaatatgatacgcagtgctaactggcaaacaacaagccgcagagcataaattcaaccatgaattttttgcgctattaaaggctttaaaagtatcaaatcttctacgaagatctgtggccagcgggggataatcagaatatacacctaacgttttaatcgtatgtatagatcctccagtaaatgacgcgtttcctacataacatctttcatcatctgacacccaaaaacaaccgagtagtagtcccacattattttttttatctatattaacggttataaaatttatatccgggcagtgactttgtagctctcccagatttcttttccctcgttcatctagcaaaactattattttaatccctttttcagatgcctcttttagtttatcaaaaataagcgctcccctagtcgtactcagaggattacaacaaaaagatgctatgtatatatatttcttagctagagtgataatttcgttaaaacattcaaatgttgttaaatgatcggatctaaaatccatattttctggtagtgtttctaccagcctacattttgctcccgcaggtaccgatgcaaatggccacatttagttaacataaaaacttatacatcctgttctatcaacgattctagaatatcatcggctatatcgctaaaattttcatcaaagtcgacatcacaacctaactcagtcaatatattaagaagttccatgatgtcatcttcgtctatttctatatccgtatccattgtagattgttgaccgattatcgagtttaaatcattactaatactcaatccttcagaatacaatctgtgtttcattgtaaatttataggcggtgtatttaagttggtagattttcaattatgtattaatatagcaacagtagttcttgctcctccttgattctagcatcctcttcattattttcttctacgtacataaacatgtccaatacgttagacaacacaccgacgatggcggccgcaggatcctgcgaagcttacagacacgaatatgactaaaccgatgaccatttaaaaacccctctctagctttcacttaaactgtatcgatcattcttttagcacatgtataatataaaaacattattctatttcgaatttaggcttccaaaaatttttcatccgtaaaccgataataatatatatagacttgttaatagtcggaataaatagattaatgcttaaactatcatcatctccacgattagagatacaatatttacattctttttgctgtttcgaaactttatcaatacacgttaatacaaacccaggaaggagatattgaaactgaggctgttgaaaatgaaacggtgaatacaataattcagataatgtaaaatcatgattccgtattctgatgatattagaactgctaatggatgtcgatggtatgtatctaggagtatctattttaacaaagcatcgatttgctaatatacaattatccttttgattaattgttattttattcatattcttaaaaggtttcatatttatcaattcttctacattaaaaatttccatttttaatttatgtagccccgcaatactcctcattacgtttcattttttgtctataatatccattttgttcatctcggtacatagattatccaattgagaagcgcatttagtagttttgtacattttaagtttattgacgaatcgtcgaaaactagttatagttaacattttattatttgataccctgatattaatacccctgccgttactattatttataactgatgtaatccacgtaacattggaattaactatcgatagtaatgcatcgacgcttccaaaattgtctattataaactcaccgataatttttttattgcatgttttcatattcattaggattatcaaatctttaatcttattacgattgtatgcgttgatattacaagacgtcattctaaaagacggaggatctccatcaaatgccagacaatcacgtacaaagtacatggaaataggttttgttctattgcgcatcatagatttatatagaacacccgtagaaatactaatttgttttactctataaaatactaatgcatctatttcatcgttttgtataacgtctttccaagtgtcaaattccaaatttttttcattgatagtaccaaattcttctatctctttaactacttgcatagataggtaattacagtgatgcctacatgccgttttttgaaactgaatagatgcgtctagaagcgatgctacgctagtcacaatcaccactttcatatttagaatatatatatgtaaaaatatagtagaatttcattttgtttttttctatgctataaatgaattctcattttgcatctgctcatactccgttttatattaataccaaagaaggaagatatctggttctaaaagccgttaaagtatgcgatgttagaactgtagaatgcgaaggaagtaaagcttcctgcgtactcaaagtagataaaccctcatcgcccgcgtgtgagagaagaccttcgtccccgtccagatgcgagagaatgaataaccctggaaaacaagttccgtttatgaggacggacatgctacaaaatatgttcgcggctaatcgcgataatgtagcttctagacttttgtcctaaaatactattatatccttttcgatattaataaatccgtgtcgtccaggttttttatctctttcagtatgtgaatagataggtattttatctctattcatcatcgaatttaagagatccgataaacattgtttgtattctccagatgtcagcatctgatacaacaatatatgtgcacataaacctctggcacttatttcatgtaccttccccttatcactaaggagaatagtatttgagaaatatgtatacatgatattatcatgaattagatatacagaatttgtaacactctcgaaatcacacgatgtgtcggcgttaagatctaatatatcactcgataacacattttcatctagatacactagacattttttaaagctaaaatagtctttagtagtaacagtaactatgcgattattttcatcgatgatacatttcatcggcatattattacgcttaccatcaaagactataccatgtgtatatctaacgtattctagcatggttgccatacgcgcattaaacttttcaggatctttggatagatcttccaatctatctatttgagaaaacatttttatcatgttcaatagttgaaacgtcggatccactatatagatattatctataaagattttaggaactacgttcatggtatcctggcgaatattaaaactatcaatgatatgattatcgttttcatcttttatcaccatatagtttctaagatatgggattttacttaatataatattatttcccgtgataaattttattagaaaggccaaatctataagaaaagtcctagaattagtctgaagaatatctatatcgccgtatagtatatttggattaattagatatagagaatatgatccgtaacatatacaacttttattatggcgtctaagatattcttccatcaacttattaacatttttgactagggaagatacattatgacgtcccattacttttgccttgtctattactgcgacgttcatagaatttagcatatctcttgccaattcttccattgatgttacattataagaaattttagatgaaattacatttggagctttaatagtaagaactcctaatatgtccgtgtatgtggtcactaatacagattgtagttctataatcgtaaataatttacctatattatatgtttgagtctgtttagaaaagtagctaagtatacgatcttttatttctgatgcagatgtattaacatcggaaaaaaatctttttttattcttttttactaaagatacaaatatgtctttgttaaaaacagttattttctgaatatttctagcttgtaattttaacatatgatattcgttcacactaggtactctgcctaaataggtttctataatctttaatgtaatattaggaaaagtattctgatcaggattcctattcattttgaggatttaaaactctgattattgtctaatatggtctctacgcaaactttttcacagagcgatagagtttttgataactcgtttttcttaagaaatataaaactactgtctccagagctcgctctatcttttattttatctaattcgatacaaactcctgatactggttcagaaagtaattcattaattttcagtcctttatagaagatatttaatatagataatacaaaatcttcagtttttgatatcgatctgattgatcctagaactagatatattaataacgtgctcattaggcagtttatggcagcttgataattagatatagtatattccagttcatatttattagataccgcattgcccagattttgatattctatgaattcctctgaaaataaatccaaaataactagacattctattttttgtggattagtgtactctcttccctctatcatgttcactactggtgtccacgatgataaatatctagagggaatataatatagtccataggatgccaatctagcaatgtcgaataactgtaattttattcttcgctcttcattatgaattgattcttgaggtataaacctaacacaaattatattattagacttttcgtatgtaatgtctttcatgttataagtttttaatcctggaatagaatctattttaatgaggcttttaaacgcagagttctccaacgagtcaaagcataatactctgttgtttttcttatatacgatgttacgattttcttctttgaatggaataggtttttgaattagtttataattacaacataatagataaggaagtgtgcaaatagtacgcggaaaaaacataatagctcccctgttttcatccatggttttaagtaaatgatcactggcttctttagtcaatggatattcgaacattaaccgtttcatcatcattggacagaatccatatttcttaatgtaaagagtgatcaaatcattgtgtttattgtaccatcttgttgtaaatgtgtattcggttatcggatctgctcctttttctattaaagtatcgatgtcaatctcgtctaagaattcaactatatcgacatatttcatttgtatacacataaccattactaacgtagaatgtataggaagagatgtaacgggaacagggtttgttgattcgcaaactattctaatacataattcttctgttaatacgtcttgcacgtaatctattatagatgccaagatatctatataattattttgtaagatgatgttaactatgtgatctatataagtagtgtaataattcatgtattttgatatatgttccaactctgtctttgtgatgtctagtttcgtaatatctatagcatcctcaaaaaatatattcgcatatattcccaagtcttcagttctatcttctaaaaaatcttcaacgtatggaatataataatctattttacctcttctgatatcattaatgatatagtttttgacactatcttctgtcaattgattcttattcactatatctaagaaacggatagcgtccctaggacgaactactgccattaatatctctattatagcttctggacataattcatctattataccagaattaatgggaactattccgtatctatctaacatagttttaagaaagtcagaatctaagacttgatgttcatatattggttcatacatgaaatgatctctattgatgatagtgactatttcattctctgaaaattggtaactcattctatatatgctttccttgttgatgaaggatagaatatactcaatagaatttgtaccaacaaactgttctcttatgaatcgtatatcatcatctgaaataatcatgtaaggcatacatttaacaattagagacttgtctcctgttatcaatatactattcttgtgataatttatgtgtgaggcaaatttgtccacgttctttaattttgttatagtagatatcaaatccaatggagctacagttcttggcttaaacagatatagtttttctggaacaaattctacaacattattataaaggactttgggtagataagtgggatgaaatcctattttaattaatgcgatagccttgtcctcgtgcagatatccaaacgcttttgtgatagtatggcattcattgtctagaaacgctctacgaatatctgtgacagatatcatctttagagaatatactagtcgcgttaatagtactacaatttgtattttttaatctatctcaataaaaaaattaatatgtatgattcaatgtataactaaactactaactgttattgataactagaatcagaatctaatgatgacgtaaccaagaagtttatctactgccaatttagctgcattatttttagcatctcgtttagattttccatcggccttatcgaatactcttccgtcgatgtctacacaggcataaaatgtaggagagttactaggcccaactgattcaatacgaaaagaccaatctctcctagtaatttggcagtactcattaataacggtgacagggttagcatctttccaatcaataatttttttagccggaataacatcatcaaaagacttatgatcctctctcattgatttttcgcgggatacatcatctattatgacgtcagccatagcatcagcatccggcttatccgcctccgttgtcataaaccaacgaggaggaatatcgtcggagctgtacaccatagcactacgttgaagatcgtacagagctttattaacttctcgcttctccatattaagttgtctagttagttgtgcagcagtagctccttcgattccaatgtttttaatagccgcacacacaatctctgcgtcagaacgctcgtcaatatagatcttagacatttttagagagaactaacgcaaccagcaataaaactgaacctactttatcatttttttattcatcatcctctggtggttcgtcgttcctatcaaatgtagctctgattaacccgtcatctataggtgatgctggttctggagattctggaggagatggattattatctggaagaatctctgttatttccttgttttcatgtatcgattgcgttgtaacattaagattgcgaaatgctctaaatttgggaggcttaaagtgttgtttgcaatctctacacgcgtgtctaactagtggaggttcgtcagctgctctagtttgaatcatcatcggcgtagtattcctacttttacagttaggacacggtgtattgtatttctcgtcgagaacgttaaaataatcgttgtaactcacatcctttattttatctatattgtattctactcctttcttaatgcattttataccgaataagagatagcgaaggaattctttttcggtgccgctagtacccttaatcatatcacatagtgttttatattccaaatttgtggcaatagacggtttatttctatacgatagtttgtttctggaatcctttgagtattctataccaatattattctttgattcgaatttagtttcttcgatattagattttgtattacctatattcttgatgtagtactttgatgatttttccatggcccattctattaagtcttccaagttggcatcatccacatattgtgatagtaattctcggatatcagtagcggctaccgccattgatgtttgttcattggatgagtaactactaatgtatacattttccatttataacacttatgtattaactttgttcatttatattttttcattattatgttgatattaacaaaagtgaatatatatatgttaataattgtattgtggttatacggctacaattttataatgagtgaaagtcagtgtccgatgatcaatgacgatagctttactctgaaaagaaagtatcaaatcgatagtgcggagtcaacaataaaaatggataagaagaggataaagtttcagaatagagccaaaatggtaaaagaaataaatcagacaataagagcagcacaaactcattacgagacattgaaactaggatacataaaatttaagagaatgattatgactactactctagaagatatagcaccatctattccaaataatcagaaaacttataaactattctcggacatttcagccatcggcaaagcatcacagaatccgagtaagatggtatatgctctgctgctttacatgtttcccaatttgtttggagatgatcatagattcattcgttatagaatgcatccaatgagtaaaatcaaacacaagatcttctctcctttcaaacttaatcttattagaatattagtggaagaaagattctataataatgaatgcagatctaataaatggagaataattggaacacaagttgataaaatgttgatagctgaatctgataaatatacaatagatgcaaggtataacctaaaacccatgtatagaatcaagggagaatctgaagaagataccctctttatcaaacagatggtagaacaatgtgtgacatcccaggaattggtggaaaaagtgttgaagatactgtttagagatttgttcaagagtggagaatacaaagcgtacagatacgatgatgatgtagaaaatggatttattggattggatacactaaaattaaacattgttcatgatatagttgaaccatgtatgcctgttcgtaggccagtggctaagatactgtgtaaagaaatggtaaataaatactttgagaatccgctacatattattggtaaaaatcttcaagagtgcattgactttgttagtgaataggcatttcatctttctccaatactaattcaaattgttaaattaataatggatagtataaatagttattagttataagatagtaaaaataattattagaataagagtgtagtatcatagataactctcttctataaaaatggattttattcgtagaaagtatcttatatacacagtagaaaataatatagattttttaaaggatgatacattaagtaaagtaaacaattttaccctcaatcatgtactagctctcaagtatctagttagcaattttcctcaacacgttattactaaggatgtattagctaataccaatttttttgttttcatacatatggtacgatgttgtaaagtgtacgaagcggttttacgacacgcatttgatgcacccacgttgtacgttaaagcattgactaagaattatttatcgtttagtaacgcaatacaatcgtacaaggaaaccgtgcataaactaacacaagatgaaaaatttttagaggttgccgaatacatggacgaattaggagaacttataggcgtaaattatgacttagttcttaatccattatttcacggaggggaacccatcaaagatatggaaatcatttttttaaaactgtttaagaaaacagacttcaaagttgttaaaaaattaagtgttataagattacttatttgggcatacctaagcaagaaagatacaggcatagagtttgcggataatgatagacaaaatatatacactctatttcaacaaactggtagaatcgtccatagcaatctaacagaaacgtttagagattatatctttcccggagataagactagctattgggtgtggttaaacgaaagtatagctaatgatgcggatatcgttcttaatagacacgccattaccatgtatgataaaattcttagttatatatactctgagataaaacaaggacgcgttaataaaaacatgcttaagttagtttatatctttgagcctgaaaaagatatcagagaacttctgctagaaatcatatatgatattcctggagatatcctatctattattgatgcaaaaaacgacgattggaaaaaatattttattagtttttataaagctaattttattaacggtaatacatttattagtgatagaacgtttaacgaggacttattcagagttgttgttcaaatagatcccgaatatttcgataatgaacgaattatgtctttattctctacgagtgctgcggacattaaacgatttgatgagttagatattaataacagttatatatctaatataatttatgaggtgaacgatatcacattagatacaatggatgatatgaagaagtgtcaaatctttaacgaggatacgtcgtattatgttaaggaatacaatacatacctgtttttgcacgagtcggatcccatggtcatagagaacggaatactaaagaaactgtcatctataaaatccaagagtagacggctgaacttgtttagcaaaaacattttaaaatattatttagacggacaattggctcgtctaggtcttgtgttagatgattataaaggagacttgttagttaaaatgataaaccatcttaagtctgtggaggatgtatccgcattcgttcgattttctacagataaaaaccctagtattcttccatcgctaatcaaaactattttagctagttataatatttccatcatcgtcttatttcaaaggtttttgagagataatctatatcatgtagaagaattcttggataaaagcatccatctaaccaagacggataagaaatatatacttcaattgataagacacggtagatcatagaacagaccaaatatattattaataatttgtatatacatagatataattatcacacatttttgataaatgggaactgctgcaacaattcagactcccaccaaattaatgaataaagaaaatgcagaaatgattttggaaaaaattgttgatcatatagttatgtatattagtgacgaatcaagtgattcagaaaataatcctgaatatattgattttcgtaacagatacgaagactatagatctctcattataaaaagtgatcacgagtttgtaaagctatgtaaaaatcatgcggagaaaagttctccagaaacgcaacaaatgattatcaaacacatatacgaacaatatcttattccagtatctgaagtactattaaaacctataatgtccatgggtgacataattacatataacggatgtaaagacaatgaatggatgctagaacaactctctaccctaaactttaacaatctccgcacatggaactcatgtagcataggcaatgtaacgcgtctgttttatacattttttagttatctgatgaaagataaactaaatatataagtataatcccattctaatactttaacctgatgtattagcatcttattagaatattaacctaactaaaagacataacataaaaactcattacatagttgataaaaagcggtaggatataaatattatggctgccaccgttccgcgttttgacgacgtgtacaaaaatgcacaaagaagaattctagatcaagaaacattttttagtagaggtctaagtagaccgttaatgaaaaacacatatctatttgataattacgcgtatggatggataccagaaactgcaatttggagtagtagatacgcaaacctagatgctagtgactattatcccatttcgttgggattacttaaaaagttcgagtttctcatgtctctatataaaggtcctattcccgtatatgaagaaaaagtaaatactgaattcatagccaatggatcgttctctggtagatacgtatcatatcttcgaaagttttctgcccttccaacaaacgagtttattagttttttgttactgacttccattccaatctataatatcttgttctggtttaaaaacacacagtttgatattactaaacacacattattcagatacgtctatacagataatgccaaacacctggcgttggctaggtatatgcatcaaacaggagactataagcctttgtttagtcgtctcaaagagaattatatatttaccggtcccgttccaataagtatcaaagatatagatcaccctaatcttagtagagcaagaagtccatccgattatgagacattagctaatattagtactatattgtactttaccaagtatgatccggtattaatgtttttattgttttacgtacctgggtattcaattactacaaaaattactccagccgtagaatatctaatggataaactgaatctaacaaagagcgacgtacaactgttgtaaattattttatgcttcgtaaaatgtaggttttgaaccaaacattctttcaaagaatgagatgcataaaactttattatccaatagattgactatttcggacgtcaatcgtttaaagtaaacttcgtaaaatattctttgatcactgccgagtttaaaacttctatcgataattgtctcatatgttttaatatttacaagttttttggtccatggtacattagccggacaaatatatgcaaaataatatcgttctccaagttctatagtttctggattatttttattatattcagtaactaaatacatattagggttatctgcggatttataatttgagtgatgcattctactcaacataaataattctagaggagacgatctactatcaaattcggatcgtaaatctgtttctaaagaacggagaatatctatacatacctgattagaattcatccgtccttcagacaacatctcagacagtctggttttgtacatcttaatcatattcttatgaaacttggaaacatctcttctagtttcactagtacctttattaattctctcaggtacagattttgaattcgacgatgctgagtatttcatcgttgtatatttcttcttcgattgcataatcagattcttatataccgcctcaaactctattttaaaattattaaacaatactctattattaatcagtcgttctaactctttcgctatttctatagacttatctacatcttgactgtctatctctgtaaacacggagtcggtatctccatacacgctacgaaaacgaaatctgtaatctataggcaacgatgttttcacaatcggattaatatctctatcgtccatataaaatggattacttaatggattggcaaaccgtaacataccgttagataactctgctccatttagtaccgattctagatacaagatcattctacgtcctatggatgtgcaactcttagccgaagcgtatgagtatagagcactatttctaaatcccatcagaccatatactgagttggctactatcttgtacgtatattgcatggaatcatagatggccttttcagttgaactggtagcctgttttagcatctttttatatctggctctctctgccaaaaatgttcttaatagtctaggaatggttccttctatcgatctatcgaaaattgctatttcagagatgaggttcggtagtctaggttcacaatgaaccgtaatatatctaggaggtggatatttctgaagcaatagctgattatttatttcttcttccaatctattggtactaacaacgacaccgactaatgtttccggagatagatttccaaagatacacacattaggatacagactgttataatcaaagattaatacattattactaaacattttttgttttggagcaaataccttaccgccttcataaggaaacttttgttttgtttctgatctaactaagatagttttagtttccaacaatagctttaacagtggacccttgatgactgtactcgctctatattcgaataccatggattgaggaagcacatatgttgacgcacccgcgtctgtttttgtttctactccataatactcccacaaatactgacacaaacaagcatcatgaatacagtatctagccatatctaaagctatgtttagattataatccttatacatctgagctaaatcaacgtcatcctttccgaaagataatttatatgtatcattaggtaaagtaggacataatagtacgactttaaatccattttcccaaatatctttacgaattactttacatataatatcctcatcaacagtcacataattacctgtggttaaaacctttgcaaatgcagcggctttgcctttcgcgtctgtagtatcgtcaccgatgaacgtcatttctctaactcctctatttaatactttacccatgcaactgaacgcgttcttggatatagaatccaatttgtacgaatccaatttttcaaatttttgaatgaatgaatatagatcgaaaaatatagttccattattgttattaacgtgaaacgtagtattggccatgccgcctactcccttatgactagactgatttctctcataaatacagagatgtacagcttcctttttgtccggagatctaaagataattttctctcctgttaataactctagacgattagtaatatatctcagatcaaagttatgtccgttaaaggtaacgacgtagtcgaacgttagttccaacaattgtttagctattcgtaacaaaactatttcagaacatagaactagttctcgttcgtaatccatttccattagtgactgtatcctcaaacatcctctatcgacggcttcttgtatttcctgttccgttaacatctcttcattaatgagcgtaaacaataatcgtttaccacttaaatcgatataacagtaacttgtatgcgagattgggttaataaatacagaaggaaacttcttatcgaagtgacactctatatctagaaataagtacgatcttgggatatcgaatctaggtatttttttagcgaaacagttacgtggatcgtcacaatgataacatccattgttaatctttgtcaaatattgctcgtccaacgagtaacatccgtctggagatatcccgttagaaatataaaaccaactaatattgagaaattcatccatggtggcattttgtatgctgcgtttctttggctcttctatcaaccacatatctgcgacggagcattttctatctttaatatctagattataacttattgtctcgtcaatgtctatagttctcatctttcccaacggcctcgcattaaatggaggaggagacaatgactgatatatttcgtccgtcactacgtaataaaagtaatgaggaaatcgtataaatacggtctcgccatttcgacatctggatttcagatataaaaatctgttttcaccgtgactttcaaaccaattaatgcaccgaacatccatttatagaatttagaaatatattttcatttaaatgaatcccaaacattggggaagagccgtatggaccattatttttatagtactttcgcaagcgggtttagacggcaacatagaagcgtgtaaacgaaaactatatactatagttagcactcttccatgtcctgcatgtagacggcacgcgactatcgctatagaggacaataatgtcatgtctagcgatgatctgaattatatttattattttttcatcagattatttaacaatttggcatctgatcccaaatacgcgatcgatgtgacaaaggttaaccctttataaacttaacccattataaaacttatgattagtcacaactgaaataaccgcgtgattattttttggtataattctacacggcatggtttctgtgactatgaattcaacccccgttacattagtgaaatctttaacaaacagcaagggttcgtcaaagacataaaactcattgtttacaatcgaaatagaccccctatcacacttaaaataaaaaatatccttatcctttaccaccaaataaaattctgattggtcaatgtgaatgtattcacttaacagttccacaaatttatttattaactccgaggcacatacatcgtcggtattttttatggcaaactttactcttccagcatccgtttctaaaaaaatattaacgagttccatttatatcatccaatattattgaaatgacgttgatggacagatgatacaaataagaaggtacggtacctttgtccaccatctcctccaattcatgctctattttgtcattaactttaatgtatgaaaacagtacgccacatgcttccatgacagtgtgtaacactttggatacaaaatgtttgacattagtataattgtccaagactgtcaatctataatagatagtagctataatatattctatgatggtattgaagaagatgacaaccttggcatattgatcatttaacacagacatggtatcaacagatagcttgaatgaaagagaatcagtaattggaataagcgtcttctcgatagagtgtccgtataccaacatgtctgatattttgatgtattccattaaattatttagttttttctttttattctcgttaaacagcatttctgtcaacggaccccaacatcgttgaccgattaagttttgattgatttttccgtgtaaggcgtatctagtcagatcgtatagcctatccaataatccatcgtctgtgtgtagatcacatcgtacactttttaattctctatagaagagcgacagacatctggagcaattacagacagcaatttctttattctctacagatgtaagatacttgaagacattcctatgatgatgcagaattttggataacacggtattgatggtatctgttaccataattcctttgatggctgatagtgtcagagcacaagatttccaatctttgacaatttttagcaccattatctttgttttgatatctatatcagacagcatggtgcgtctgacaacacagggattaagacggaaagatgaaatgattctctcaacatcttcaatagataccttgctattttttctggcattatctatatgtgcgagaatatcctctagagaatcagtatcctttttgatgatagtggatctcaatgacatgggacgtttaaaccttcttattctatcaccagattgcatggtgatttgtcttctttcttttatcataatgtaatctctaaattcatcggcaaattgtctatatctaaaatcataatatgagatgtttacctctacaaatatctgttcgtccaatgttagagtatttacatcagttttgtattccaaattaaacatggcaacggatttaattttatattcctctattaagtcctcgtcgataataacagaatgtagataatcatttaatccgtcgtacatggttggaagatgcttgttgacaaaatctttaattgtcttgatgaaggtgggactatatctaacatcttgattaataaaatttataacattgtccataggatactttgtaactagttttatacacatctcttcatcggtaagtttagacagaatatcgtgaacaggtggtatattatattcatcagatatacgaagaacaatgtccaaatctatattgtttaatatattatatagatgtagcgtagctcctacaggaatatctttaactaagtcaatgatttcatcaaccgttagatctattttaaagttaatcatataggcattgatttttaaaaggtatgtagccttgactacattctcattaattaaccattccaagtcattgtgtgtaagaagattatattctatcataagcttgactacatttggtcccgataccattaaagaattcttatgatataaggaaacagattttaggtactcatctactctacaagaattttggagagccttaacgatatcagtgacgtttattatttcaggaggaaagaatctaacattgagaatatcggaattaatagcttccagatacagtgattttggcaatagtccgtgtaatccataatccagtaacacgagctggtgcttgctagacaccttttcaatgtttaatttttttgaaataagctttgataaagccttcctcgcaaattccggatacatgaacatgtcggcgacatgattaagtattgttttttcattatttttatattttctcaacaagttctcaataccccaatagatgatagaatatcacccaatgcgtccatgttgtctatttccaacaggtcgctatatccaccaatagaagtttttccaaaaaagattctaggaacagttctaccaccagtaatttgttcaaaataatcccgcaattcattttcgggtttaaattctttaatatcgacaatttcatacgctcctcttttgaaactaaacttatttagaatatccagtgcatttctacaaaaaggacatgtatacttgacaaaaattgtcactttgttattggccaacctttgttgtacaaattcctcggccattttaatatttaagtgatataaaactatctcgacttatttaactctttagtcgagatatatggacgcagatagctatatgatagccaactacagaaggcaaacgctataaaaaacataattacgacgagcatatttataaatatttttattcagcattacttgatatagtaatattaggcacagtcaaacattcaaccactctcgatacattaactctctcattttctttaacaaattctgcaatatcttcgtaaaaagattcttgaaactttttagaatatctatcgactctagatgaaatagcgttcgtcaacatactatgttttgtatacataaaggcgcccattttaacagtttctagtgacaaaatgctagcgatcctaggatcctttagaatcacatagattgacgattcgtctctcttagtaactctagtaaaataatcatacaatctagtacgcgaaataatattatccttgacttgaggagatctaaacaatctagttttgagaacatcgataagttcatcgggaatgacatacatactatctttaatagaactcttttcatccagttgaatggattcgtccttaaccaactgattaatgagatcttctattttatcattttccagatgatatgtatgtccattaaagttaaattgtgtagcgcttctttttagtctagcagccaatactttaacatcactaatatcgatatacaaaggagatgatttatctatggcattaagaattcgtttttcgacatccgtcaaaaccaattcctttttgcctgtatcatccagttttccatcctttgtaaagaaattattttctactagactattaataagactgataaggattcctccataattgcacaatccaaactttttaacaaaactagactttacgagatctacaggaatgcgtacttcaggttttttagcttgtgattttttcttttgcggacattttctagtaaccaactcatctaccatttcattgattttagcagtgaaataagctttcaatgcacgggcactgatactattgaaaacgagttgatcttcaaattccgccatttaagttcaccaaacaacttttaaatacaaatatatcaatagtagtagaataagaactataaaaaaaataataattaaccaaccccaacaaccggtattattagttgatgtggtagttttctcatcacttagaacagatttaacaatttctataaagtctgtcaaatcatcttccggagaccccataaatacaccaaatatagcggcgtacaacttatccatttatacattgaatattggcttttctttatcgctatcttcatcatattcatcatcaatatcaacaagtcccagattacgagccagatcttcttctacattttcagtcattgatacacgttcactatctccagagagtccgataacgttagccaccacttctctatcaatgattagtttcttgagcgcgaaagtaatttttgtttccgttccggatctatagaagacgataggtgtgataattgccttggccaattgtctttctcttttactgagtgattctagttcaccttctatagatctgagaatggatgattctccagtcgaaacatattctaccatggatccgtttaatttgttgatgaagatggattcatccttaaatgttttctctgtaatagtttccaccgaaagactatgcaaagaatttggaatgcgttccttgtgcttaatgtttccatagacggcttctagaagttgatacaacataggactagccgcggtaacttttatttttagaaagtatccatcgcttctatcttgtttagatttatttttataaagtttagtctctccttccaacataataaaagtggaagtcatttgactagataaactatcagtaagttttatagagatagacgaacaattagcgtattgagaagcatttagtgtaacgtattcgatacattttgcattagatttactaatcgattttgcatactctataacacccgcacaagtctgtagagaatcgctagatgcagtaggtcttggtgaagtttcaactctcttcttgattaccttactcatgattaaacctaaataattgtactttgtaatataatgatatatattttcactttatctcatttgagaataaaaatgtttttgtttaaccactgcatgatgtacagatttcggaatcgcaaaccaccagtggttttattttatccttgtccaatgtgaattgaatgggagcggatgcgggtttcgtacgtagatagtacattcccgtttttagaccgagactccatccgtaaaaatgcatactcgttagtttggaataactcggatctgctatatggatattcatagattgactttgatcgatgaaggctcccctgtctgcagccatttttatgatcgtcttttgtggaatttcccaaatagttttataaactcgcttaatatcttctggaaggtttgtattctgaatggatccaccatctgccataatcctattcttgatctcatcattccataattttctctcggttaaaactctaaggagatgcggattaactacttgaaattctccagacaatactctccgagtgtaaatattactggtatacggttccaccgactcattatttcccaaaatttgagcagttgatgcagtcggcataggtgccaccaataaactatttctaagaccgtatgttctgattttatcttttagaggttcccaattccaaagatccgacggtacaacattccaaagatcatattgtagaataccgttactggcgtacgatcctacatatgtatcgtatggtccttccttctcagctagttcacaactcgcctctaatgcaccgtaataaatggtttcgaagatcttcttatttagatcttgtgcttccaggctatcaaatggataatttaagagaataaacgcgtccgctaatccttgaacaccaataccgataggtctatgtctcttattagagatttcagcttctggaataggataataattaatatctataattttattgagatttctgacaattactttgaccacatccttcagtttgagaaaatcaaatcgcccatctattacaaacatgttcaaggcaacagatgccagattacaaacggctacctcattagcatccgcatattgtattatctcagtgcaaagattactacacttgatagttcctaaattttgttgattactctttttgttacacgcatccttataaagaatgaatggagtaccagtttcaatctgagattctataatcgctttccagacgactcgagcctttattatagatttgtatctcctttctctttcgtatagtgtatacaatcgttcgaactcgtctccccaaacattgtccaatccaggacattcatccggacacatcaacgaccactctccgtcatccttcactcgtttcataaagagatcaggaatccaaagagctataaatagatctctggttctatgttcctcgtttcctgtattctttttaagatcgaggaacgccataatatcagaatgccacggttccaagtatatggccataactccaggccgtttgtttcctccctgatctatgtatctagcggtgttattataaactctcaacattggaataataccgtttgatataccattggtaccggagatatagcttccactggcacgaatattactaattgatagacctattccccctgccattttagagattaatgcgcatcgttttaacgtgtcatagataccctctatgctatcatcgatcatgttaagtagaaaacagctagacatttggtgacgactagttcccgcattaaataaggtaggagaagcgtgcgtaaaccatttttcagaaagtagattgtacgtctcaatagctgagtctatatcccattgatgaattcctactgcgacacgcattaacatgtgctgaggtctttcaacgatcttgttgtttattttcaacaagtaggatttttccaaagttttaaaaccaaaatagttgtatgaaaagtctcgttcgtaaataataaccgagttgagtttatccttatatttgttaactatatccatggtgatacttgaaataatcggagaatgtttcccatttttaggattaacatagttgaataaatcctccatcacttcactaaatagtttttttgtttccttgtgtagatttgatacggctattctggcggctagaatggcataatccggatgttgtgtagtacaagtggctgctatttcggctgccagagtgtccaattctaccgttgttactccattatatattccttgaataaccttcatagctattttaataggatctatatgatccgtgtttaagccataacataattttctaatacgagacgtgattttatcaaacatgacattttccttgtatccatttcgtttaatgacaaacatttttgttggtgtaataaaaaaattatttaacttttcattaatagggatttgacgtatgtagcgtacaaaatgattgttcctggtatatagataaagagtcctatatatttgaaaatcgttacggctcgattaaactttaatgattgcatagtgaatatatcattaggatttaactccttgactatcatggcggcgccagaaattaccatcaaaagcattaatacagttataccgatcgcagttagaacggttatagcatccaccatttatatctaaaaattagatcaaagaatatgtgacaaagtcctagttgtatactgagaattgacgaaacaatgtttcttacatatttttttcttattagtaaccgacttaatagtaggaactggaaaactagacttgattattctataagtatagatacccttccaaataatattctctttgataaaagttccagaaaatgtagaattttttaaaaagttatcttttgctattaccaagattgtgtttagacgcttattattaatatgagtgatgaaatccacaccgcctctagatatcgcctttatttccacattagatggtaaatccaatagtgaaactatctttttaggaatgtatggactcgcgtttagaggagtaaacgtcttaggcgtcggaaaggatgattcatcaaacgaataaacaatttcacaaatggatgttaatgtattagtaggaaattttttgacgctattggaattgaagattctaatggatgatgttctacctatttcatccgataacatgttaatttccgacaccaacggttttaatatttcgatgatatacggtagtctctctttcggacttatatagcttattccacaatacgagtcattatatactccaaaaaacaaaataactagtataaaatctgtatcgaatgggaaaaacgaaattatcgacataggtatagaatccggaacattgaacgtattaatacttaattctttttctgtggtaagtaccgataggttattgacattgtatggttttaaatattctataacttgagacttgatagatattagtgatgaattgaaaattatttttatcaccacgtgtgtttcaggatcatcgtcgacgcccgtcaaccaaccgaacggagtaaaataaatatcattaatatatgctctagatattagtatttttatcaatcctttgattatcatcttctcgtaggcgaatgattccatgatcaagagtgatttaagaacatcctccggagtattaatgggcttagtaaacagtccatcgttgcaataataaaagttatccaagttaaaggatattatgcattcgtttaaagatatcacctcatctgacggagacaattttttggtaggttttagagactttgaagctacttgtttaacaaagttattcatcgtcgtctactattctatttaattttgtagttaatttatcacatatcacattaattgactttttggtccacttttccatacgtttatattcttttaatcctgcgttatccgtttccgttatatccagggatagatcttgcaagttaaatagaatgctcttaaataatgtcattttcttatccgctaaaaatttaaagaatgtataaacctttttcagagatttgaaactcttaggtggtgtcctagtacacaatatcataaacaaactaataaacattccacattcagattccaacagctgattaacttccacattaatacagcctattttcgctccaaatgtacattcgaaaaatctgaataaaacatcgatgtcacaatttgtattatccaatacagaatgtttgtgattcgtgttaaaaccatcggagaaggaatagaaataaaaattattatagtggtggaattcagttggaatattgcctccggagtcataaaaggatactaaacattgttttttatcataaattacacatttccaatgagacaaataacaaaatccaaacattacaaatctagaggtagaacttttaattttgtctttaagtatatacgataagatatgtttattcataaacgcgtcaaatttttcatgaatcgctaaggagtttaagaatctcatgtcaaattgtcctatataatccacttcggatccataagcaaactgagagactaagttcttaatacttcgattgctcatccaggctcctctctcaggctctattttcatcttgacgacctttggattttcaccagtatgtattcctttacgtgataaatcatcgattttcaaatccatttgtgagaagtctatcgccttagatactttttcccgtagtcgaggtttaaaaaaatacgctaacggtatactagtaggtaactcaaagacatcatatatagaatggtaacgcgtctttaactcgtcggttaactctttcttttgatcgagttcgtcgctactattgggtctgctcaggtgccccgactctactagttccaacatcataccgataggaatacaagacactttgccggcggttgtagatttatcatatttttccactacatatccgttacaatttgttaaaaatttagatacatctatattgctacataatccagctagtgaatatatatgacataataaattggtaaatcctagttctggtattttactaattactaaatctgtatatctttccatttatcatggaaaagaatttaccagatatcttcttttttccaaactgcgttaatgtattctcttacaaatattcacaagatgaattcagtaatatgagtaaaacggaacgtgatagtttctcattggccgtgtttccagttataaaacatagatggcataacgcacacgttgtaaaacataaaggaatatacaaagttagtacagaagcacgtggaaaaaaagtatctcctccatcactaggaaaacccgcacacataaacctaaccgcgaagcaatatatatacagtgaacacacaataagctttgaatgttatagttttctaaaatgtataacaaatacagaaatcaattcgttcgatgagtatatattaagaggactattagaagctggtaatagtttacagatattttccaattccgtaggtaaacgaacagatactataggtgtactagggaataagtatccatttagcaaaattccattggcctcattaactcctaaagcacaacgagagatattttcagcgtggatttctcatagacctgtagttttaactggaggaactggagtgggtaagacgtcacaggtacccaagttattgctttggtttaattatttatttggtggattctctactctagataaaatcactgactttcacgaaagaccagtcattctatctcttcctaggatagctttagttagattgcatagcaataccattttaaaatcattgggatttaaggtactagatggatctcctatttctttacggtacggatctataccggaagaattaataaacaaacaaccaaaaaaatatggaattgtattttctacccataagttatctctaacaaaactatttagttatggcactcttattatagacgaagttcatgagcatgatcaaataggagatattattatagcagtagcgagaaagcatcatacgaaaatagattctatgtttttaatgactgccacgttagaggatgacagggaacggctaaaagtatttttacctaatcccgcatttatacatattcctggagatacactgtttaaaattagcgaggtatttattcataataagataaatccatcttccagaatggcatacatagaagaagaaaagagaaatttagttactgctatacagatgtatactcctcctgatggatcatccggtatagtctttgtggcatccgttgcacagtgtcacgaatataaatcatatttagaaaaaagattaccgtatgatatgtatattattcatggtaaggtcttagatatagacgaaatattagaaaaagtgtattcatcacctaatgtatcgataattatttctactccttatttggaatccagcgttactatacgcaatgttacacacatttatgatatgggtagagtttttgtccccgctccttttggaggatcgcaacaatttatttctaaatctatgagagatcaacgaaaaggaagagtaggaagagttaatcctggtacatacgtctatttctatgatctgtcttatatgaagtctatacagcgaatagattcagaatttctacataattatatattgtacgctaataagtttaatctaacactccccgaagatttgtttataatccctacaaatttggatattctatggcgtacaaaggaatatatagactcgttcgatattagtacagaaacatggaataaattattatccaattattatatgaagatgatagagtatgctaaactttatgtactaagtcctattctcgctgaggagttggataactttgagaggacgggagaattaactagtattgtacgagaagccattttatctctaaatttacaaattaagattttaaattttaaacataaagatgatgatacgtatatacacttttgtaaaatattattcggtgtctataacggaacaaacgctactatatattatcatagacctctaacgggatatatgaatatgatttcagatactatatttgttcctgtagataataactaaaaatcaaactctaatgaccacatctttttttagagatgaaaaattttccacatctccttttgtagacacgactaaacattttgcagaaaaaagtttattagtgtttagataatcgtatacttcatcagtgtagatagtaaatgtgaacagataaaaggtattcttgctcaatagattggtaaattccatagaatatattaatcctttcttcttgagatcccacatcatttcaaccagagacgttttatccaatgatttacctcgtactataccacatacaaaactagattttgcagtgacgtcgtacctggtattcctaccaaacaaaattttacttttagttcttttagaaaattctaaggtagaatctctatttgccaatatgtcatctatggaattaccactagcaaaaaatgatagaaatatatattgatacatcgcagctggttttgatctactatactttaaaaacgaatcagattccataattgcctgtatatcatcagctgaaaaactatgttttacacgtattccttcggcatttctttttaatgatatatcttgtttagacaatgataaagttatcatgtccatgagagacgcgtctccgtatcgtataaatatttcattagatgttagacgcttcattaggggtatacttctataaggtttcttaatcagtccatcattggttgcgtcaagaactactatcggatgttgttgggtatctctagtgttacacatggccttactaaagtttgggtaaataactatgatatctctattaattatagatgcatatatttcattcgtcaaggatattagtatcgacttgctatcgtcattaatacgtgtaatgtaatcatataaatcatgcgatagccaaggaaaatttaaatagatgttcatcatataatcgtcgctataattcatattaatacgttgacattgactaatttgtaatatagcctcgccacgaagaaagctctcgtattcagtttcatcgataaaggataccgttaaatataactggttgccgatagtctcatagtctattaagtggtaagtttcgtacaaatacagaatccctaaaatattatctaatgttggattaatctttaccataactgtataaaatggagacggagtcataactattttaccgtttgtacttactggaatagatgaaggaataatctccggacatgctggtaaagacccaaatgtctgtttgaagaaatccaatgttccaggtcctaatctcttaacaaaaattacgatattcgatcccgatatcctttgcattctatttaccagcatatcacgaactatattaagattatctatcatgtctattctcccaccgttatataaatcgcctccgctaagaaacgttagtatatccatacaatggaatacttcatttctaaaatagtattcgttttctaattctttaatgtgaaatcgtatactagaaagggaaaaattatctttgagttttccgttagaaaagaaccacgaaactaatgttctgattgcgtccgattccgttgctgaattaatggatttacaccaaaaactcatataacttctagatgtagaagcattcgctaaaaaattagtagaatcaaaggatataagtagatgttccaacaagtgagcaattcccaagatttcatctatatcattctcgaatccgaaattagaaattcccaagtagatatcctttttcatccgatcgttgatgaaaatacgaactttattcggtaagacaatcatttactaaggagtaaaataggaagtaatgttcgtatgtcgttatcatcgtataaattaaaggtgtgttttttaccattaagtgacattataattttaccaatattggaattataatataggtgtatttgcgcactcgcgacggttgatgcatcggtaaatatagctgtatctaatgttctagtcggtatttcatcatttcgctgtctaataatagcgttttctctatctgtttccattacagctgcctgaagtttattggtcggataatatgtaaaataataagaaatacatacgaataacaaaaataaaataagatataataaagatgccatttagagatctaattttgtttaacttgtccaaattcctacttacagaagatgaggaatcgttggagatagtgtcttccttatgtagaggatttgaaatatcttataatgacttgataacttactttccagataggaaataccataaatatatttataaagtatttgaacatgtagatttatcggaggaattaagtatggaattccatgatacaactctgagagatttagtctatcttagattgtacaagtattccaagtgtatacggccgtgttataaattaggagataatctaaaaggcatagttgttataaaggacaggaatatttatattagggaagcaaatgatgacttgatagaatatctcctcaaggaatacactcctcagatttatacatattctaatgagcgcgtccccataactggttcaaaattaattctttgtggattttctcaagttacatttatggcgtatacaacgtcgcatataacaacaaataaaaaggtagatgttctcgtttccaaaaaatgtatagatgaactagtcgatccaataaattatcaaatacttcaaaatttatttgataaaggaagcggaacaataaacaaaatactcaggaagatattttattcggtaacaggtggccaaactccataggtagctttttctatttcggattttagaatttccaaattcaccagcgatttatcggttttggtgaaatccaaggatttattaatgtccacaaatgccatttgttttgtctgtggattgtatttgaaaatggaaacgatgtagttagatagatgcgctgcgaagtttcctattagggttccgcgcttcacgtcacccagcatacttgaatcaccatcctttaaaaaaaatgataagatatcaacatggagtatatcatactcgaattttaattcttctactgactcactgacattttcacaaatactacaatacggtttaccgaaaataatcagtacgttcttcatttatgggtatcaaaaacttaaaatcgttactgctggaaaataaatcactgacgatattagatgataatttatacaaagtatacaatggaatatttgtggatacaatgagtatttatatagccgtcgccaattgtgtcagaaacttagaagagttaactacggtattcataaaatacgtaaacggatgggtaaaaaagggagggcatgtaaccctttttatcgatagaggaagtataaaaattaaacaagacgttagagacaagagacgtaaatattctaaattaaccaaggacagaaaaatgttagaattagaaaagtgtacatccgaaatacaaaatgttaccggatttatggaagaagaaataaaggcagaaatgcaattaaaaatcgataaactcacatttcaaatatatttatctgattctgataacataaaaatatcattgaatgagatactaacacatttcaacaataatgagaatgttacattattttattgtgatgaacgagacgcagaattcgttatgtgtctcgaggctaaaacacatttctctaccacaggagaatggccgttgataataagtaccgatcaggatactatgctatttgcatctgctgataatcatcctaagatgataaaaaacttaactcaactgtttaaatttgttccctcggcagaggataactatttagcaaaattaacggcgttagtgaatggatgtgatttctttcctggactctatggggcatctataacacccaccaacttaaacaaaatacaattgtttagtgattttacaatcgataatatagtcactagtttggcaattaaaaattattatagaaagactaactctaccgtagacgtgcgtaatattgttacgtttataaacgattacgctaatttagacgatgtctactcgtatattcctccttgtcaatgcactgttcaagaatttatattttccgcattagatgaaaaatggaatgaatttaaatcatcttatttagaaagcgtgccgttaccctgccaattaatgtacgcgttagaaccacgcaaggagattgatgtttcagaagttaaaactttatcatcttatatagatttcgaaaatactaaatcagatatcgatgttataaaatctatatcctcgatcttcggatattctaacgaaaactgtaacacgatagtattcggcatctataaggataatttactactgagtataaataattcattttactttaacgatagtctgttaataaccaatactaaaagtgataatataataaatataggttactagattaaaaatggtgttccaactcgtgtgctctacatgcggtaaagatatttctcacgaacgatataaattgattatacgaaaaaaatcattaaaggatgtactcgtcagtgtaaagaacgaatgttgtaggttaaaattatctacacaaatagaacctcaacgtaacttaacagtgcaacctctattggatataaactaatatggatccggttaattttatcaagacatatgcgcctagaggttctattatttttattaattataccatgtcattaacaagtcatttgaatccatcgatagaaaaacatgtgggtatttattatggtacgttattatcggaacacttggtagttgaatctacctatagaaaaggagttcgaatagtcccattggatagtttttttgaaggatatcttagtgcaaaagtatacatgttagagaatattcaagttatgaaaatagcagctgatacgtcattaactttattgggtattccgtatggatttggtcatgatagaatgtattgttttaaattggtagctgactgttataaaaatgccggtattgatacatcgtctaaacgaatattgggcaaagatatttttctgagccaaaacttcacagacgataatagatggataaagatatatgattctaataatttaacattttggcaaattgattaccttaaagggtgagttaatatgcataactactcctccgttgttttttccctcgttctttttcttaacgttgtttgccatcactctcataatgtaaagatattctaaaatggtaaacttttgcatatcggacgcagaaattggtataaatgttgtaattgtattatttcccgtcaatggactagtcacagctccatcagttttatatcctttagagtatttctcactcgtgtctaacattctagagcattccatgatctgtttatcgttgatattggccggaaagatagattttttattttttattatattactattggcaattgtagatataacttctggtaaatatttttctaccttttcaatctcttctattttcaagccggctatatattctgctatattgttgctagtatcaataccttttctggctaagaagtcatatgtggtattcactatatcagttttaactggtagttccattagcctttccacttctgcagaataatcagaaattggttctttaccagaaaatccagctactataataggctcaccgatgatcattggcaaaatcctatattgtaccagattaatgagagcatatttcatttccaataattctgctagttcttgagacattgatttatttgatgaatctagttggttctctagatactctaccatttctgccgcatacaataacttgttagataaaatcagggttatcaaagtgtttagcgtggctagaatagtgggcttgcatgtattaaagaatgcggtagtatgagtaaaccgttttaacgaattatatagtctccagaaatctgtggcgttacatacatgagccgaatgacatcgaagattgtccaatatttttaatagctgctctttgtccattatttctatatttgactcgcaacaattgtagataccattaatcaccgattcctttttcgatgccggacaatagcacaattgtttagctttggactctatgtattcagaattaatagatatatctctcaatacagattgcactatacattttgaaactatgtcaaaaattgtagaacgacgctgttctgcagccatttaactttaaataatttacaaaaatttaaaatgagcatccgtataaaaatcgataaactgcgccaaattgtggcatatttttcagagttcagtgaagaagtgtctataaatgtagactcgacggatgagttaatgtatatttttgccgccttgggcggatctgtaaacatttgggcaattatacctctaagtgcatcagtgttttaccgaggagccgaaaatattgtgtttaatcttcctgtgtccaaggtaaaatcgtgtttgtgtagttttcacaatgatgccatcatagatatagaacctgatctggaaaataatctagtaaaactttctagttatcatgtagtaagtgtcgattgtaacaaggaactgatgcctattaggacagatactactatttgtctaagtatagatcaaaagaaatcttacgtgtttaattttcacaagtatgaagaaaaatgttgtggtagaaccgtcattcatctagaatggttgttgggctttatcaagtgtattagtcagcatcagcatctggctattatgtttaaagatgacaatattattatgaagactcctggtaatactgatgcgttttccagggaatattctatgactgaatgttctcaagaactacaaaagttttctttcaaaatagctatctcgtctctcaacaaactacgaggattcaaaaagagagtcaatgtttttgaaactagaatcgtaatggataatgacgataacattttaggaatgttgttttcggatagagttcaatcctttaagatcaacatctttatggcgtttttagattaatactttcaatgagataaatatgggtggcggagtaagtgttgagctccctaaacgggatccgcctccgggagtacccactgatgagatgttattaaacgtggataaaatgcatgacgtgatagctcccgctaagcttttagaatatgtgcatataggaccactagcaaaagataaagaggataaagtaaagaaaagatatccagagtttagattagtcaacacaggacccggtggtctttcggcattgttaagacaatcgtataatggaaccgcacccaattgctgtcgcacttttaatcgtactcattattggaagaaggatggaaagatatcagataagtatgaagagggtgcagtattagaatcgtgttggccagacgttcacgacactggaaaatgcgatgttgatttattcgactggtgtcagggggatacgttcgatagaaacatatgccatcagtggatcggttcagcctttaataggagtaatagaactgtagagggtcaacaatcgttaataaatctgtataataagatgcaaacattatgtagtaaagatgctagtgtaccaatatgcgaatcatttttgcattatttacgcgcacacaatacagaagatagcaaagagatgatcgattatattctaagacaacagtctgcggactttaaacagaaatatatgagatgtagttatcccactagagataagttagaagagtcattaaaatatgcggaacctcgagaatgttgggatccagagtgttcgaatgccaatgttaatttcttactaacacgtaattataataatttaggactttgcaatattgtacgatgtaataccagcgtgaacaacttacagatggataaaacttcctcattaagattgtcatgtggattaagcaatagtgatagattttctactgttcccgtcaatagagcaaaagtagttcaacataatattaaacactcgttcgacctaaaattgcatttgatcagtttattatctctcttggtaatatggatactaattgtagctatttaaatgggtgccgcggcaagcatacagacgacggtgaatacactcagcgaacgtatctcgtctaaattagaacaagaagcgaacgctagtgctcaaacaaaatgtgatatagaaatcggaaatttttatatccgacaaaaccatggatgtaacctcactgttaaaaatatgtgctctgcggacgcggatgctcagttggatgctgtgttatcagccgctacagaaacatatagtggattaacaccggaacaaaaagcatacgtgccagctatgtttactgctgcgttaaacattcagacgagtgtaaacactgttgttagagattttgaaaattatgtgaaacagacttgtaattctagcgcggtcgtcgataacaaattaaagatacaaaacgtaatcatagatgaatgttacggagccccaggatctccaacaaatttggaatttattaatacaggatctagcaaaggaaattgtgccattaaagcgttgatgcaattgacgactaaggccactactcaaatagcacctagacaagttgctggtacaggagttcagttttatatgattgttatcggtgttataatattggcagcgttgtttatgtactatgccaagcgtatgttgttcacatccaccaatgataaaatcaaacttattttagccaataaggaaaacgtccattggactacttacatggacacattctttagaacttctccgatggttattgctaccacggatatgcaaaactgaaaatatattgataatattttaatagattaacatggaagttatcgctgatcgtctagacgatatagtgaaacaaaatatagcggatgaaaaatttgtagattttgttatacacggtctagagcatcaatgtcctgctatacttcgaccattaattaggttgtttattgatatactattatttgttatagtaatttatatttttacggtacgtctagtaagtagaaattatcaaatgttgttggtggtgctagtcatcacattaactattttttattactttatactataatagtactagactgacttctaacaaacatctcacctgccataaataaatgcttgatattaaagtcttctatttctaacactattccatctgtggaaaataatactctgacattatcgctaattgacacatcggtgagtgatatgcctataaagtaataatcttctttgggcacatataccagtgtaccaggttctaacaacctatttactggtgctcctgtagcatactttttctttaccttgagaatatccatcgtttgcttggtcaatagcgatatgtgattttttatcaaccactcaaaaaagtaattggagtgttcatatcctctacgggctattgtctcatggccgtgtatgaaatttaagtaacacgactgtggtagatttgttctatagagccgattgccgcaaatagatagaactaccaatatgtctgtacaaatgttaaacattaattgattaacagaaaaaacaatgttcgttctgggaatagaaaccagatcaaaacaaaattcgttagaatatatgccacgtttatacatggaatataaaataactacagtttgaaaaataacagtatcatttaaacatttaacttgcggggttaatctcacaactttactgtttttgaactgttcaaaatatagcatcgatccgtgagaaatacgtttagccgcctttaatagaggaaatcccaccgcctttctggatctcaccaacgacgatagttctgaccagcaactcatttcttcatcatccacctgttttaacatataataggcaggagatagatatccgtcattgcaatattccttctcgtaggcacacaatctaatattgataaaatctccattctcttctctgcatttattatcttgtctcggtggctgattaggctgtggtcttggtttaggccttggtctatcgttgttgaatctattttggtcattaaatctttcatttcttcctggtatatttctatcacctcgtttggttggatttttgtctatattatcgtttgtaacatcggtacgggtattcatttatcacaaaaaaaacttctctaaatgagtctactgctagaaaacctcatcgaagaagataccatattttttgcaggaagtatatctgagtatgatgatttacaaatggttattgccggcgcaaaatccaaatttccaagatctatgctttctatttttaatatagtacctagaacgatgtcaaaatatgagttggagttgattcataacgaaaatatcacaggagcaatgtttaccacaatgtataatataagaaacaatttgggtctaggagatgataaactaactattgaagccattgaaaactatttcttggatcctaacaatgaagttatgcctcttattattaataatacggatatgactgccgtcattcctaaaaaaagtggtaggagaaagaataagaacatggttatcttccgtcaaggatcatcacctatcttgtgcattttcgaaactcgtaaaaagattaatatttataaagaaaatatggaatccgcgtcgactgagtatacacctatcggagacaacaaggctttgatatctaaatatgcgggaattaatgtcctgaatgtgtattctccttccacatccataagattgaatgccatttacggattcaccaataaaaataaactagagaaacttagtactaataaggaactagaatcgtatagttctagccctcttcaagaacccattaggttaaatgattttctgggactattggaatgtgttaaaaagaatattcctctaacagatattccgacaaaggattgattactataaatggagaatgttcctaatgtatactttaatcctgtgtttatagagcccacgtttaaacattctttattaagtgtttataaacacagattaatagttttatttgaagtattcgttgtattcattctaatatatgtattttttagatctgaattaaatatgttcttcatgcctaaacgaaaaatacccgatcctattgatagattacgacgtgctaatctagcgtgtgaagacgataaattaatgatctatggattaccatggatgacaactcaaacatctgcgttatcaataaatagtaaaccgatagtgtataaagattgtgcaaagcttttgcgatcaataaatggatcacaaccagtatctcttaacgatgttcttcgcagatgatgattcattttttaagtatttggctagtcaagatgatgaatcttcattatctgatatattgcaaatcactcaatatctagactttctgttattattattgatccaatcaaaaaataaattagaagctgtgggtcattgttatgaatctctttcagaggaatacagacaattgacaaaattcacagactttcaagattttaaaaaactgtttaacaaggtccctattgttacagatggaagggtcaaacttaataaaggatatttgttcgactttgtgattagtttgatgcgattcaaaaaagaatcctctctagctaccaccgcaatagatcctgttagatacatagatcctcgtcgcaatatcgcattttctaacgtgatggatatattaaagtcgaataaagtgaacaataattaattctttattgtcatcatgaacggcggacatattcagttgataatcggccccatgttttcaggtaaaagtacagaattaattagacgagttagacgttatcaaatagctcaatataaatgcgtgactataaaatattctaacgataatagatacggaacgggactatggacgcatgataagaataattttgaagcattggaagcaactaaactatgtgatgtcttggaatcaattacagatttctccgtgataggtatcgatgaaggacagttctttccagacattgttgaattagatcgataaaaattaattaattacccgggtaccaggcctagatctgtcgagatccggtggtggtgcaaatcaaagaactgctcctcagtggatgttgcctttacttctaggcctgtacggaagtgttacttctgctctaaaagctgctgcagggggggggggggggtgggggggccggttagggccgccatcccctcagagcgtcgggatatcgggtggcggctcgggacggaggacgcgctagtgttcttctgtgtggcagttcagaatgatggatcaagctagatcagcattctctaacttgtttggtggagaaccattgtcatatacccggttcagcctggctcggcaagtagatggcgataacagtcatgtggagatgaaacttgctgtagatgaagaagaaaatgctgacaataacacaaaggccaatgtcacaaaaccaaaaaggtgtagtggaagtatctgctatgggactattgctgtgatcgtctttttcttgattggatttatgattggctacttgggctattgtaaaggggtagaaccaaaaactgagtgtgagagactggcaggaaccgagtctccagtgagggaggagccaggagaggacttccctgcagcacgtcgcttatattgggatgacctgaagagaaagttgtcggagaaactggacagcacagacttcaccagcaccatcaagctgctgaatgaaaattcatatgtccctcgtgaggctggatctcaaaaagatgaaaatcttgcgttgtatgttgaaaatcaatttcgtgaatttaaactcagcaaagtctggcgtgatcaacattttgttaagattcaggtcaaagacagcgctcaaaactcggtgatcatagttgataagaacggtagacttgtttacctggtggagaatcctgggggttatgtggcgtatagtaaggctgcaacagttactggtaaactggtccatgctaattttggtactaaaaaagattttgaggatttatacactcctgtgaatggatctatagtgattgtcagagcagggaaaatcacctttgcagaaaaggttgcaaatgctgaaagcttaaatgcaattggtgtgttgatatacatggaccagactaaatttcccattgttaacgcagaactttcattctttggacatgctcatctggggacaggtgacccttacacacctggattcccttccttcaatcacactcagtttccaccatctcggtcatcaggattgcctaatatacctgtccagacaatctccagagctgctgcagaaaagctgtttgggaatatggaaggagactgtccctctgactggaaaacagactctacatgtaggatggtaacctcagaaagcaagaatgtgaagctcactgtgagcaatgtgctgaaagagataaaaattcttaacatctttggagttattaaaggctttgtagaaccagatcactatgttgtagttggggcccagagagatgcatggggccctggagctgcaaaatccggtgtaggcacagctctcctattgaaacttgcccagatgttctcagatatggtcttaaaagatgggtttcagcccagcagaagcattatctttgccagttggagtgctggagactttggatcggttggtgccactgaatggctagagggatacctttcgtccctgcatttaaaggctttcacttatattaatctggataaagcggttcttggtaccagcaacttcaaggtttctgccagcccactgttgtatacgcttattgagaaaacaatgcaaaatgtgaagcatccggttactgggcaatttctatatcaggacagcaactgggccagcaaagttgagaaactcactttagacaatgctgctttccctttccttgcatattctggaatcccagcagtttctttctgtttttgcgaggacacagattatccttatttgggtaccaccatggacacctataaggaactgattgagaggattcctgagttgaacaaagtggcacgagcagctgcagaggtcgctggtcagttcgtgattaaactaacccatgatgttgaattgaacctggactatgagaggtacaacagccaactgctttcatttgtgagggatctgaaccaatacagagcagacataaaggaaatgggcctgagtttacagtggctgtattctgctcgtggagacttcttccgtgctacttccagactaacaacagatttcgggaatgctgagaaaacagacagatttgtcatgaagaaactcaatgatcgtgtcatgagagtggagtatcacttcctctctccctacgtatctccaaaagagtctcctttccgacatgtcttctggggctccggctctcacacgctgccagctttactggagaacttgaaactgcgtaaacaaaataacggtgcttttaatgaaacgctgttcagaaaccagttggctctagctacttggactattcagggagctgcaaatgccctctctggtgacgtttgggacattgacaatgagttttaaatgtgatacccatagcttccatgagaacagcagggtagtctggtttctagacttgtgctgatcgtgctaaattttcagtagggctacaaaacctgatgttaaaattccatcccatcatcttggtactactagatgtctttaggcagcagcttttaatacagggtagataacctgtacttcaagttaaagtgaataaccacttaaaaaatgtccatgatggaatattcccctatctctagaattttaagtgctttgtaatgggaactgcctctttcctgttgttgttaatgaaaatgtcagaaaccagttatgtgaatgatctctctgaatcctaagggctggtctctgctgaaggttgtaagtggtcgcttactttgagtgatcctccaacttcatttgatgctaaataggagataccaggttgaaagaccttctccaaatgagatctaagcctttccataaggaatgtagctggtttcctcattcctgaaagaaacagttaactttcagaagagatgggcttgttttcttgccaatgaggtctgaaatggaggtccttctgctggataaaatgaggttcaactgttgattgcaggaataaggccttaatatgttaacctcagtgtcatttatgaaaagaggggaccagaagccaaagacttagtatattttcttttcctctgtcccttcccccataagcctccatttagttctttgttatttttgtttcttccaaagcacattgaaagagaaccagtttcaggtgtttagttgcagactcagtttgtcagactttaaagaataatatgctgccaaattttggccaaagtgttaatcttaggggagagctttctgtccttttggcactgagatatttattgtttatttatcagtgacagagttcactataaatggtgtttttttaatagaatataattatcggaagcagtgccttccataattatgacagttatactgtcggttttttttaaataaaagcagcatctgctaataaaacccaacagatactggaagttttgcatttatggtcaacacttaagggttttagaaaacagccgtcagccaaatgtaattgaataaagttgaagctaagatttagagatgaattaaatttaattaggggttgctaagaagcgagcactgaccagataagaatgctggttttcctaaatgcagtgaattgtgaccaagttataaatcaatgtcacttaaaggctgtggtagtactcctgcaaaattttatagctcagtttatccaaggtgtaactctaattcccattttgcaaaatttccagtacctttgtcacaatcctaacacattatcgggagcagtatcttccataatgtataaagaacaaggtagtttttacctaccacagtgtctgtatcggagacagtgatctccatatgttacactaagggtgtaagtaattatcgggaacagtgtttcccataattttcttcatgcaatgacatcttcaaagcttgaagatcgttagtatctaacatgtatcccaactcctataattccctatcttttagttttagttgcagaaacattttgtggtcattaagcattgggtgggtaaattcaaccactgtaaaatgaaattactacaaaatttgaaatttagcttgggtttttgttacctttatggtttctccaggtcctctacttaatgagatagtagcatacatttataatgtttgctattgacaagtcattttaactttatcacattatttgcatgttacctcctataaacttagtgcggacaagttttaatccagaattgaccttttgacttaaagcagagggactttgtatagaaggtttgggggctgtggggaaggagagtcccctgaaggtctgacacgtctgcctacccattcgtggtgatcaattaaatgtaggtatgaataagttcgaagctccgtgagtgaaccatcattataaacgtgatgatcagctgtttgtcatagggcagttggaaacggcctcctagggaaaagttcatagggtctcttcaggttcttagtgtcacttacctagatttacagcctcacttgaatgtgtcactactcacagtctctttaatcttcagttttatctttaatctcctcttttatcttggactgacatttagcgtagctaagtgaaaaggtcatagctgagattcctggttcgggtgttacgcacacgtacttaaatgaaagcatgtggcatgttcatcgtataacacaatatgaatacagggcatgcattttgcagcagtgagtctcttcagaaaacccttttctacagttagggttgagttacttcctatcaagccagtacgtgctaacaggctcaatattcctgaatgaaatatcagactagtgacaagctcctggtcttgagatgtcttctcgttaaggagatgggccttttggaggtaaaggataaaatgaatgagttctgtcatgattcactattctagaacttgcatgacctttactgtgttagctctttgaatgttcttgaaattttagactttctttgtaaacaaatgatatgtccttatcattgtataaaagctgttatgtgcaacagtgtggagattccttgtctgatttaataaaatacttaaacactgaaaaaaaaaaaaaaaaaaaaaaaaaaaaaaaaaaaaaaaaaaaaaaaaaaaaaaaaaaaaaaaaaaaaaaaaaaaaaaaaagtaccttctgaggcggaaagaaccagccggatctcgacttcgagcttatttatattccaaaaaaaaaaaataaaatttcaatttttaagctttcactaattccaaacccacccgctttttatagtaagtttttcacccataaataataaatacaataattaatttctcgtaaaagtagaaaatatattctaatttattgcacggtaaggaagtagatcataactcgagcatgggagatcccgtcgttttacaacgtcgtgactgggaaaaccctggcgttacccaacttaatcgccttgcagcacatccccctttcgccagctggcgtaatagcgaagaggcccgcaccgatcgcccttcccaacagttgcgcagcctgaatggcgaatggcgctttgcctggtttccggcaccagaagcggtgccggaaagctggctggagtgcgatcttcctgaggccgatactgtcgtcgtcccctcaaactggcagatgcacggttacgatgcgcccatctacaccaacgtgacctatcccattacggtcaatccgccgtttgttcccacggagaatccgacgggttgttactcgctcacatttaatgttgatgaaagctggctacaggaaggccagacgcgaattatttttgatggcgttaactcggcgtttcatctgtggtgcaacgggcgctgggtcggttacggccaggacagtcgtttgccgtctgaatttgacctgagcgcatttttacgcgccggagaaaaccgcctcgcggtgatggtgctgcgctggagtgacggcagttatctggaagatcaggatatgtggcggatgagcggcattttccgtgacgtctcgttgctgcataaaccgactacacaaatcagcgatttccatgttgccactcgctttaatgatgatttcagccgcgctgtactggaggctgaagttcagatgtgcggcgagttgcgtgactacctacgggtaacagtttctttatggcagggtgaaacgcaggtcgccagcggcaccgcgcctttcggcggtgaaattatcgatgagcgtggtggttatgccgatcgcgtcacactacgtctgaacgtcgaaaacccgaaactgtggagcgccgaaatcccgaatctctatcgtgcggtggttgaactgcacaccgccgacggcacgctgattgaagcagaagcctgcgatgtcggtttccgcgaggtgcggattgaaaatggtctgctgctgctgaacggcaagccgttgctgattcgaggcgttaaccgtcacgagcatcatcctctgcatggtcaggtcatggatgagcagacgatggtgcaggatatcctgctgatgaagcagaacaactttaacgccgtgcgctgttcgcattatccgaaccatccgctgtggtacacgctgtgcgaccgctacggcctgtatgtggtggatgaagccaatattgaaacccacggcatggtgccaatgaatcgtctgaccgatgatccgcgctggctaccggcgatgagcgaacgcgtaacgcgaatggtgcagcgcgatcgtaatcacccgagtgtgatcatctggtcgctggggaatgaatcaggccacggcgctaatcacgacgcgctgtatcgctggatcaaatctgtcgatccttcccgcccggtgcagtatgaaggcggcggagccgacaccacggccaccgatattatttgcccgatgtacgcgcgcgtggatgaagaccagcccttcccggctgtgccgaaatggtccatcaaaaaatggctttcgctacctggagagacgcgcccgctgatcctttgcgaatacgcccacgcgatgggtaacagtcttggcggtttcgctaaatactggcaggcgtttcgtcagtatccccgtttacagggcggcttcgtctgggactgggtggatcagtcgctgattaaatatgatgaaaacggcaacccgtggtcggcttacggcggtgattttggcgatacgccgaacgatcgccagttctgtatgaacggtctggtctttgccgaccgcacgccgcatccagcgctgacggaagcaaaacaccagcagcagtttttccagttccgtttatccgggcaaaccatcgaagtgaccagcgaatacctgttccgtcatagcgataacgagctcctgcactggatggtggcgctggatggtaagccgctggcaagcggtgaagtgcctctggatgtcgctccacaaggtaaacagttgattgaactgcctgaactaccgcagccggagagcgccgggcaactctggctcacagtacgcgtagtgcaaccgaacgcgaccgcatggtcagaagccgggcacatcagcgcctggcagcagtggcgtctggcggaaaacctcagtgtgacgctccccgccgcgtcccacgccatcccgcatctgaccaccagcgaaatggatttttgcatcgagctgggtaataagcgttggcaatttaaccgccagtcaggctttctttcacagatgtggattggcgataaaaaacaactgctgacgccgctgcgcgatcagttcacccgtgcaccgctggataacgacattggcgtaagtgaagcgacccgcattgaccctaacgcctgggtcgaacgctggaaggcggcgggccattaccaggccgaagcagcgttgttgcagtgcacggcagatacacttgctgatgcggtgctgattacgaccgctcacgcgtggcagcatcaggggaaaaccttatttatcagccggaaaacctaccggattgatggtagtggtcaaatggcgattaccgttgatgttgaagtggcgagcgatacaccgcatccggcgcggattggcctgaactgccagctggcgcaggtagcagagcgggtaaactggctcggattagggccgcaagaaaactatcccgaccgccttactgccgcctgttttgaccgctgggatctgccattgtcagacatgtataccccgtacgtcttcccgagcgaaaacggtctgcgctgcgggacgcgcgaattgaattatggcccacaccagtggcgcggcgacttccagttcaacatcagccgctacagtcaacagcaactgatggaaaccagccatcgccatctgctgcacgcggaagaaggcacatggctgaatatcgacggtttccatatggggattggtggcgacgactcctggagcccgtcagtatcggcggaattccagctgagcgccggtcgctaccattaccagttggtctggtgtcaaaaataataataaccgggcaggggggatccaattctgtgagcgtatggcaaacgaaggaaaaatagttatagtagccgcactcgatgggacatttcaacgtaaaccgtttaataatattttgaatcttattccattatctgaaatggtggtaaaactaactgctgtgtgtatgaaatgctttaaggaggcttccttttctaaacgattgggtgaggaaaccgagatagaaataataggaggtaatgatatgtatcaatcggtgtgtagaaagtgttacatcgactcataatattatattttttatctaaaaaactaaaaataaacattgattaaattttaatataatacttaaaaatggatgttgtgtcgttagataaaccgtttatgtattttgaggaaattgataatgagttagattacgaaccagaaagtgcaaatgaggtcgcaaaaaaactgccgtatcaaggacagttaaaactattactaggagaattattttttcttagtaagttacagcgacacggtatattagatggtgccaccgtagtgtatataggatctgctcccggtacacatatacgttatttgagagatcatttctataatttaggagtgatcatcaaatggatgctaattgacggccgccatcatgatcctattttaaatggattgcgtgatgtgactctagtgactcggttcgttgatgaggaatatctacgatccatcaaaaaacaactgcatccttctaagattattttaatttctgatgtgagatccaaacgaggaggaaatgaacctagtacggcggatttactaagtaattacgctctacaaaatgtcatgattagtattttaaaccccgtggcgtctagtcttaaatggagatgcccgtttccagatcaatggatcaaggacttttatatcccacacggtaataaaatgttacaaccttttgctccttcatattcagctgaaatgagattattaagtatttataccggtgagaacatgagactgactcgagttaccaaattagacgctgtaaattatgaaaaaaagatgtactaccttaataagatcgtccgtaacaaagtagttgttaactttgattatcctaatcaggaatatgactattttcacatgtactttatgctgaggaccgtgtactgcaataaaacatttcctactactaaagcaaaggtactatttctacaacaatctatatttcgtttcttaaatattccaacaacatcaactgaaaaagttagtcatgaaccaatacaacgtaaaatatctagcaaaaattctatgtctaaaaacagaaatagcaagagatccgtacgcggtaataaatagaaacgtactactgagatatactaccgatatagagtataatgatttagttactttaataaccgttagacataaaattgattctatgaaaactgtgtttcaggtatttaacgaatcatccataaattatactccggttgatgatgattatggagaaccaatcattataacatcgtatcttcaaaaaggtcataacaagtttcctgtaaattttctatacatagatgtggtaatatctgacttatttcctagctttgttagactagatactacagaaactaatatagttaatagtgtactacaaacaggcgatggtaaaaagactcttcgtcttcccaaaatgttagagacggaaatagttgtcaagattctctatcgccctaatataccattaaaaattgttagatttttccgcaataacatggtaactggagtagagatagccgatagatctgttatttcagtcgctgattaatcaattagtagagatgagataagaacattataataatcaataatatatcttatatcttatatcttatatcttatatcttgtttagaaaaatgctaatattaaaatagctaacgctagtaatccaatcggaagccatttgatatctataatagggtatctaatttcctgatttaaatagcggacagctatattctcggtagctactcgtttggaatcacaaacattatttacatctaatttactatctgtaatggaaacgtttcccaatgaaatggtacaatccgatacattgcattttgttatatttttttttaaagaggctggtaacaacgcatcgcttcgtttacatggctcgtaccaacaataatagggtaatcttgtatctattcctatccgtactatgcttttatcaggataaatacatttacatcgtatatcgtctttgttagcatcacagaatgcataaatttgttcgtccgtcatgataaaaatttaaagtgtaaatataactattatttttatagttgtaataaaaagggaaatttgattgtatactttcggttctttaaaagaaactgacttgataaaaatggctgtaatctctaaggttacgtatagtctatatgatcaaaaagagattaatgctacagatattatcattagtcatgttaaaaatgacgacgatatcggtaccgttaaagatggtagactaggtgctatggatggggcattatgtaagacttgtgggaaaacggaattggaatgtttcggtcactggggtaaagtaagtatttataaaactcatatagttaagcctgaatttatttcagaaattattcgtttactgaatcatatatgtattcactgcggattattgcgttcacgagaaccgtattccgacgatattaacctaaaagagttatcgggacacgctcttaggagattaaaggataaaatattatccaagaaaaagtcatgttggaacagtgaatgtatgcaaccgtatcaaaaaattactttttcaaagaaaaaggtttgtttcgtcaacaagttggatgatattaacgttcctaattctctcatctatcaaaagttaatttctattcatgaaaagttttggccattattagaaattcatcaatatccagctaacttattttatacagactactttcccatccctccgttgattattagaccggctattagtttttggatagatagtatacccaaagagaccaatgaattaacttacttattaggtatgatcgttaagaattgtaacttgaatgctgatgaacaggttatccagaaggcggtaatagaatacgatgatattaaaattatttctaataacactaccagtatcaatttatcatatattacatccggcaaaaataatatgattagaagttatatcgtcgcccgacgaaaagatcagaccgctagatctgtaattggtcccagtacatctatcaccgttaatgaggtaggaatgcccgcatatattagaaatacacttacagaaaagatatttgttaatgcctttacagtggataaagttaaacaactattagcgtcaaaccaagttaaattttactttaataaacgattaaaccaattaacaagaatacgccaaggaaagtttattaaaaataaaatacatttattgcctggtgattgggtagaagtagctgttcaagaatatacaagtattatttttggaagacagccgtctctacatagatacaacgtcatcgcttcatctatcagagctaccgaaggagatactatcaaaatatctcccggaattgccaactctcaaaatgctgatttcgacggggatgaggaatggatgatattagaacaaaatcctaaagctgtaattgaacaaagtattcttatgtatccgacgacgttactcaaacacgatattcatggagcccccgtttatggatctattcaagatgaaatcgtagcagcgtattcattgtttaggatacaagatctttgtttagatgaagtattgaacatcttggggaaatatggaagagagttcgatcctaaaggtaaatgtaaattcagcggtaaagatatctatacttacttgataggtgaaaagattaattatccgggtctcttaaaggatggtgaaattattgcaaacgacgtagatagtaattttgttgtggctatgaggcatctgtcattggctggactcttatccgatcataagtcgaacgtggaaggtatcaactttattatcaagtcatcttatgtttttaagagatatctatctatttacggttttggggtgacattcaaagatctgagaccaaattcgacgttcactaataaattggaggccatcaacgtagaaaaaatagaacttatcaaagaagcatacgccaaatatctcaacgatgtaagagacgggaaaatagttccattatctaaagctttagaggcggactatgtggaatccatgttatccaacttgacaaatcttaatatccgagagatagaagaacatatgagacaaacgctgatagatgatccagataataacctcctgaaaatggccaaagcgggttataaagtaaatcccacagaactaatgtatattctaggtacgtatggacaacaaaggattgatggtgaaccagcagagactcgagtattgggtagagttttaccttactatcttccagactctaaggatccagaaggaagaggttacattcttaattctttaacaaaaggattaacgggttctcaatattacttttcgatgctggttgccagatctcaatctactgatatcgtctgtgaaacatcacgtaccggaacactggctagaaaaatcattaaaaagatggaggatatggtggtcgacggatacggacaagtagttataggtaatacgctcatcaagtacgccgccaattataccaaaattctaggctcagtatgtaaacctgtagatcttatctatccagatgagtccatgacttggtatttggaaattagtgctctgtggaataaaataaaacagggattcgtttactctcagaaacagaaacttgcaaagaagacattggcgccgtttaatttcctagtattcgtcaaacccaccactgaggataatgctattaaggttaaggatctgtacgatatgattcataacgtcattgatgatgtgagagagaaatacttctttacggtatctaatatagattttatggagtatatattcttgacgcatcttaatccttctagaattagaattacaaaagaaacggctatcactatctttgaaaagttctatgaaaaactcaattatactctaggtggtggaactcctattggaattatttctgcacaggtattgtctgagaagtttacacaacaagccctgtccagttttcacactactgaaaaaagtggtgccgtcaaacaaaaacttggtttcaacgagtttaataacttgactaatttgagtaagaataagaccgaaattatcactctggtatccgatgatatctctaaacttcaatctgttaagattaatttcgaatttgtatgtttgggagaattaaatccaaacatcactcttcgaaaagaaacagataaatatgtagtagatataatagtcaatagattatacatcaagagagcagaaataaccgaattagtcgtcgaatatatgattgaacgatttatctcctttagcgtcattgtaaaggaatggggtatggagacattcattgaggacgaggataatattagatttactgtctacctaaatttcgttgaaccggaagaattgaatcttagtaagtttatgatggttcttccgggggcagccaacaagggaaagattagtaaattcaagattcctatctctgattatacgggatatgacgacttcaatcaaacaaaaaagctcaataagatgactgtagaactcatgaatctaaaagaattgggttctttcgatttggaaaacgtcaacgtgtatcctggagtatggaatacatacgatatcttcggtatcgaggccgctcgtgaatacttgtgcgaagccatgttaaacacctatggagaagggttcgattatctgtatcagccttgtgatcttctcgctagtttactatgtgctagttacgaaccagaatcagtgaataaattcaagttcggcgcagctagtactcttaagagagctacgttcggagacaataaagcattgttaaacgcggctcttcataaaaagtcagaacctattaacgataatagtagctgccacttttttagcaaggtccctaatataggaactggatattacaaatactttatcgacttgggtcttctcatgagaatggaaaggaaactatctgataagatatcttctcaaaagatcaaggaaatggaagaaacagaagacttttaattcttatcaataacatatttttctatgatctgtcttttaaacgatggattttccacaaatgcgcctctcaagtccctcatagaatgatacacgtataaaaaatatagcataggcaatgactccttatttttagacattagatatgccaaaatcatagccccgcttctatttactcccgcagcacaatgaaccaacacgggctcgtttcgttgatcacatttagataaaaaggcggttacgtcgtcaaaatatttactaatatcggtagttgtatcatctaccaacggtatatgaataatattaatattagagttaggtaatgtatatttatccatcgtcaaatttaaaacatatttgaacttaacttcagatgatggtgcatccatagcatttttataatttcccaaatacacattattggttacccttgtcattatagtgggagatttggctttgtgcatatctccagttgaacgtagtagtaagtatttatacaaacttttcttatccatttataacgtacaaatggataaaactactttatcggtaaacgcgtgtaatttagaatacgttagagaaaaggctatagtaggcgtacaagcagccaaaacatcaacacttatattctttgttattatattggcaattagtgcgctattactctggtttcagacgtctgataatccagtctttaatgaattaacgagatatatgcgaattaaaaatacggttaacgattggaaatcattaacggatagcaaaacaaaattagaaagtgatagaggtagacttctagccgctggtaaggatgatatatttgaattcaaatgtgtggatttcggcgcctattttatagctatgcgattggataagaaaacatatctgccgcaagctattaggcgaggtactggagacgcgtggatggttaaaaaggcggcaaaggtcgatccatctgctcaacaattttgtcagtatttgataaaacacaagtctaataatgttattacttgtggtaatgagatgttaaatgaattaggttatagcggttattttatgtcaccgcattggtgttccgattttagtaatatggaatagtgttagataaatgcggtaacgaatgttcctgtaaggaaccataacagcttagatttaacgttaaagatgagcataaacataataaacaaaattacaatcaaacttataacattaatatcaaacaatccaaaaaatgaaatcagtggagtagtaaacgcgtacataactcctggataacgtttagcagctgccgttcctattctagaccaaaaattcggtttcatgttttcgaaacggtattctgcaacaagtcgaggatcgtgttctacatatttggcggcattatccagtatctgcctattgatcttcatttcgttttcgattctggctatttcaaaataaaatcccgatgatagacctccagactttataatttcatctacgatgttcagcgccgtagtaactctaataatataggctgataagctaacatcataccctcctgtatatgtgaatatggcatgatttttgtccattacaagctcggttttaactttattgcctgtaataatttctctcatctgtaggatatctatttttttgtcatgcattgccttcaagacgggacgaagaaacgtaatatcctcaataacgttatcgttttctacaataactacatattctacctttttattttctaactcggtaaaaaaattagaatcccatagggctaaatgtctagcgatatttcttttcgtttcctctgtacacatagtgttacaaaaccctgaaaagaagtgagtatacttgtcatcatttctaatgtttcctccagtccactgtataaacgcataatccttgtaatgatctggatcatccttgactaccacaacatttcttttttctggcataacttcgttgtcctttacatcatcgaacttctgatcattaatatgctcatgaacattaggaaatgtttctgatggaggtctatcaataactggcacaacaataacaggagttttcaccgccgccatttagttattgaaattaatcatatacaactctttaatacgagttatattttcgtctatccattgtttcacattgacatatttcgacaaaaagatataaaatgcgtattccaatgcttctctgtttaatgaattactaaaatatacaaacacgtcactgtctggcaataaatgatatcttagaatattgtaacaatttattttgtattgcacatgttcgtgatctatgagttcttcttcgaatggcataggatctccgaatctgaaaacgtataaataggagttagaataataatatttgagagtattggtaatatataaactctttagcggtataattagtttttttctctcaatttctatttttagatgtgatggaaaaatgactaattttgtagcattagtatcatgaactctaatcaaaatcttaatatcttcgtcacacgttagctctttgaagtttttaagagatgcatcagttggttctacagatggagtaggtgcaacaattttttgttctacacatgtatgtactggagccattgttttaactataatggtgcttgtatcgaaaaactttaatgcagatagcggaagctcttcgccgcgactttctacgtcgtaattgggttctaacgccgatctctgaatggatactagttttctaagttctaatgtgattctctgaaaatgtaaatccaattcctccggcattatagatgtgtatacatcggtaaataaaactatagtatccaacgatcccttctcgcaaattctagtcttaaccaaaaaatcgtatataaccacggagatggcgtatttaagagtggattcttctaccgttttgttcttggatgtcatataggaaactataaagtccgcactactgttaagaatgattactaacgcaactatatagtttaaattaagcattttggaaacataaaataactctgtagacgatacttgactttcgaataagtttgcagacaaacgaagaaagaacagacctctcttaatttcagaagaaaactttttttcgtattcctgacgtctagagtttatatcaataagaaagttaagaattagtcggttaatgttgtatttcattacccaagtttgagatttcataatattatcaaaagacatgataatattaaagataaagcgctgactatgaacgaaatagctatatggttcgctcaagaatatagtcttgttaaacgtggaaacgataactgtatttttaatcacgtcagcggcatctaaattaaatataggtatatttattccacacactctacaatatgccacaccatcttcataataaataaattcgttagcaaaattattaattttagtgaaatagttagcgtcaactttcatagcttccttcaatctaatttgatgctcacacggtgcgaattccactctaacatcccttttccatgcctcaggttcatcgatctctataatatctagttttttgcgtttcacaaacacaggctcgtctctcgcgatgagatctgtatagtaactatgtaaatgataactagatagaaagatgtagctatatagatgacgatcctttaagagaggtataataactttaccccaatcagatagactgttgttatggtcttcggaaaaagaatttttataaatttttccagtattttccaaatatacgtacttaacatctaaaaaatccttaatgataataggaatggataatccgtctattttataaagaaatacatatcgcacattatacttttttttggaaatgggaataccgatgtgtctacataaatatgcaaagtctaaatattttttagagaatcttagttggtccaaattcttttccaagtacggtaatagatttttcatattgaacggtatcttcttaatctctggttctagttccgcattaaatgatgaaactaagtcactatttttataactaacgattacatcacctctaacatcatcatttaccagaatactgatcttcttttgtcgtaaatacatgtctaatgtgttaaaaaaaagatcatacaagttatacgtcatttcatctgtggtattcttgtcattgaaggataaactcgtactaatctcttctttaacagcctgttcaaatttatatcctatatacgaaaaaatagcaaccagtgtttgatcatccgcgtcaatattctgttctatcgtagtgtataacaatcgtatatcttcttctgtgatagtcgatacgttataaaggttgataacgaaaatatttttatttcgtgaaataaagtcatcgtaggattttggacttatattcgcgtctagtagatatgcttttatttttggaatgatctcaattagaatagtctctttagagtccatttaaagttacaaacaactaggaaattggtttatgatgtataatttttttagtttttatagattctttattctatacttaaaaaatgaaaataaatacaaaggttcttgagggttgtgttaaattgaaagcgagaaataatcataaattatttcattatcgcgatatccgttaagtttgtatcgtaatggcgtggtcaattacgaataaagcggatactagtagcttcacaaagatggctgaaatcagagctcatctaaaaaatagcgctgaaaataaagataaaaacgaggatattttcccggaagatgtaataattccatctactaagcccaaaaccaaacgagccactactcctcgtaaaccagcggctactaaaagatcaaccaaaaaggaggaagtggaagaagaagtagttatagaggaatatcatcaaacaactgaaaaaaattctccatctcctggagtcagcgacattgtagaaagcgtggccgctgtagagctcgatgatagcgacggggatgatgaacctatggtacaagttgaagctggtaaagtaaatcatagtgctagaagcgatctctctgacctaaaggtggctaccgacaatatcgttaaagatcttaagaaaattattactagaatctctgcagtatcgacggttctagaggatgttcaagcagctggtatctctagacaatttacttctatgactaaagctattacaacactatctgatctagtcaccgagggaaaatctaaagttgttcgtaaaaaagttaaaacttgtaagaagtaaatgcgtgcacttttttataaagatggtaaactctttaccgataataattttttaaatcctgtatcagacgataatccagcgtatgaggttttgcaacatgttaaaattcctactcatttaacagatgtagtagtatatgaacaaacgtgggaggaggcgttaactagattaatttttgtgggaagtgattcaaaaggacgtagacaatacttttacggaaaaatgcatgtacagaatcgcaacgctaaaagagatcgtatttttgttagagtatataacgttatgaaacgaattaattgttttataaacaaaaatataaagaaatcgtccacagattccaattatcagttggcggtttttatgttaatggaaactatgttttttattagatttggtaaaatgaaatatcttaaggagaatgaaacagtagggttattaacactaaaaaataaacacatagaaataagtcccgatgaaatagttatcaagtttgtaggaaaggacaaagtttcacatgaatttgttgttcataagtctaatagactatataaaccgctattgaaactgacggatgattctagtcccgaagaatttctgttcaacaaactaagtgaacgaaaggtatacgaatgtatcaaacagtttggtattagaatcaaggatctccgaacgtatggagtcaattatacgtttttatataatttttggacaaatgtaaagtccatatctcctcttccgtcaccaaaaaagttaatagcattaactatcaaacaaactgctgaagtggtaggtcatactccatcaatttcaaaaagagcttatatggcaacgactattttagaaatggtaaaggataaaaattttttagatgtagtatctaaaactacgttcgatgaattcctatctatagtcgtagatcacgttaaatcatctacggatggatgatatagatctttacacaaataattacaagaccgataaatggaaatggataagcgtatgaaatctctcgcaatgacagctttcttcggagagctaagcacattagatattatggcattgataatgtctatatttaaacgccatccaaacaataccattttttcagtggataaggatggtcagtttatgattgatttcgaatacgataattataaggcttctcaatatttggatctgaccctcactccgatatctggagatgaatgcaagactcacgcatcgagtatagccgaacaattggcgtgtgcggatattattaaagaggatattagcgaatatatcaaaactactccccgtcttaaacgatttataaaaaaataccgcaatagatcagatactcgtatcagtcgagatacagaaaagcttaaaatagctctagctaaaggcatagattacgaatatataaaagacgcttgttaataagtaaatgaaaaaaaactagtcgtttataataaaacacgatatggatgccaacgtagtatcattttctactattgcgacgtatatagacgctttagcgaagaatgcttcggaattagaacagaggtctaccgcatacgaaataaataatgaattggaactagtatttattaagccgccattgattactttgacaaatgtagtgaatatctctacgattcaggaatcgtttattcgatttaccgttactaataaggaaggtgttaaaattagaactaagattccattatctaaggtacatggtctagatgtaaaaaatgtacagttagtagatgctatagataacatagtttgggaaaagaaatcattagtgacggaaaatcgtcttcacaaagaatgcttgttgagactatcgacagaggaacgtcatatatttttggattacaagaaatatggatcctctatccgactagaattagtcaatcttattcaagcaaaaacaaaaaactttacgatagactttaagctaaaatattttctaggatccggtgcccagtctaaaagttctttgttgcacgctattaatcatccaaagtcaaggcctaatacatctctggaaatagaattcacacctagagacaatgaaacagttccatatgatgaactaataaaggaattgacgactctctcgcgtcatatatttatggcttctccagagaatgtaattctttctccgcctattaacgcgcctataaaaacctttatgttgcctaaacaagatatagtaggtttggatctggaaaatctatatgccgtaactaagactgacggcattcctataactatcagagttacatcaaacgggttgtattgttattttacacatcttggttatattattagatatcctgttaagagaataatagattccgaagtagtagtctttggtgaggcagttaaggataagaactggaccgtatatctcattaagctaatagagcctgtgaatgcaatcaatgatagactagaagaaagtaagtatgttgaatctaaactagtggatatttgtgatcggatagtattcaagtcaaagaaatacgaaggtccgtttactacaactagtgaagtcgtcgatatgttatctacatatttaccaaagcaaccagaaggtgttattctgttctattcaaagggacctaaatctaacattgattttaaaattaaaaaggaaaatactatagaccaaactgcaaatgtagtatttaggtacatgtccagtgaaccaattatctttggagaatcgtctatctttgtagagtataagaaatttagcaacgataaaggctttcctaaagaatatggttctggtaagattgtgttatataacggcgttaattatctaaataatatctattgtttggaatatattaatacacataatgaagtgggtattaagtccgtggttgtacctattaagtttatagcagaattcttagttaatggagaaatacttaaacctagaattgataaaaccatgaaatatattaactcagaagattattatggaaatcaacataatatcatagtcgaacatttaagagatcaaagcatcaaaataggagatatctttaacgaggataaactatcggatgtgggacatcaatacgccaataatgataaatttagattaaatccagaagttagttattttacgaataaacgaactagaggaccgttgggaattttatcaaactacgtcaagactcttcttatttctatgtattgttccaaaacatttttagacgattccaacaaacgaaaggtattggcgattgattttggaaacggtgctgacctggaaaaatacttttatggagagattgcgttattggtagcgacggatccggatgctgatgctatagctagaggaaatgaaagatacaacaaattaaactctggaattaaaaccaagtactacaaatttgactacattcaggaaactattcgatccgatacatttgtctctagtgtcagagaagtattctattttggaaagtttaatatcatcgactggcagtttgctatccattattcttttcatccgagacattatgctaccgtcatgaataacttatccgaactaactgcttctggaggcaaggtattaatcactaccatggacggagacaaattatcaaaattaacagataaaaagacttttataattcataagaatttacctagtagcgaaaactatatgtctgtagaaaaaatagctgatgatagaatagtggtatataatccatcaacaatgtctactccaatgactgaatacattatcaaaaagaacgatatagtcagagtgtttaacgaatacggatttgttcttgtagataacgttgatttcgctacaattatagaacgaagtaaaaagtttattaatggcgcatctacaatggaagatagaccgtctacaaaaaactttttcgaactaaatagaggagccattaaatgtgaaggtttagatgtcgaagacttacttagttactatgttgtttatgtcttttctaagcggtaaataataatatggtatgggttctgatctcccagttctaaatgcattaaataattccaatagagcgatttttgttcctataggaccttccaactgtggatactctgtattgttaatagatatattaatacttttgtcgggtaacagaggttctacgtcttctaaaaataaaagttttataacatctggcctgttcataaataaaaacttggcgattctatatatactcttattatcaaatctagccattgtcttatagatgtgagctactgtaggtgtaccatttgattttctttctaatactatatatttctctcgaagaagttcttgcacatcatctgggaataaaatactactgttgagtaaatcagttattttttttatatcgatattgatggacatttttatagttaaggataataagtatcccaaagtcgataacgacgataacgaagtatttatacttttaggaaatcacaatgactttatcagattaaaattaacaaaattaaaggagcatgtatttttttctgaatatattgtgactccagatacatatggatctttatgcgtcgaattaaatgggtctagttttcagcacggcggtagatatatagaggtggaggaatttatagatgctggaagacaagttagatggtgttctacatccaatcatatatctaaagatatacccgaagatatgcacactgataaatttgtcatttatgatatttatacgtttgattcgttcaagaataaacgattggtattcgtacaggtacctccgtcgttaggagatgatagtcatttgactaatccgttattgtcaccgtattatcgtaattcagtagccagacaaatggtcaatgatatgatttttaatcaagattcatttttaaaatatttattagaacatctgattagaagccactatagagtttctaaacatataacaatagttagatacaaggataccgaagaattaaatctaacgagaatatgttataatagagataagtttaaggcgtttgtattcgcttggtttaacggcgtttcggaaaatgaaaaggtactagatacgtataaaaaggtatctaatttgatataatgaattcagtgactgtatcacacgcgccatatactattacttatcacgatgattgggaaccagtaatgagtcaattggtagagttttataacgaagtagccagttggctgctacgagacgagacgtcgcctattcctgataagttctttatacagttgaaacaaccgcttagaaataaacgagtatgtgtgtgtggtatagatccgtatccgaaagatggaactggtgtaccgttcgaatcaccaaattttacaaaaaaatcaattaaggagatagcttcatctatatctagattaaccggagtaattgattataaaggttataaccttaatataatagacggggttataccctggaattattacttaagttgtaaattaggagaaacaaaaagtcacgcgatttactgggataagatttccaagttactgctgcagcatataactaaacacgttagtgttctttattgtttgggtaaaacagatttctcgaatatacgggccaagttagaatccccggtaactaccatagtcggatatcatccagcggctagagaccgccaattcgagaaagatagatcatttgaaattatcaacgttttactggaattagacaacaaggcacctataaattgggctcaagggtttatttattaatgctttagtgaaattttaacttgtgttctaaatggatgcggctattagaggtaatgatgttatctttgttcttaagactataggtgtcccgtcagcgtgcagacaaaatgaagatccaagatttgtagaagcatttaaatgcgacgagttagaaagatatattgagaataatccagaatgtacactattcgaaagtcttagggatgaggaagcatactctatagtcagaattttcatggatgtagatttagacgcgtgtctagacgaaatagattatttaacggccattcaagattttattatcgaggtgtcaaactgtgtagctagattcgcgtttacagaatgcggcgccattcatgaaaatgtaataaaatccatgagatctaatttttcattgactaagtctacaaatagagataaaacaagttttcatattatctttttagatacgtataccactatggatacattgatagctatgaaacgaacactattagaattaagtagatcatctgaaaatccactaaccagatcgatagacactgccgtatataggagaaaaacaactcttcgggttgtaggtactaggaaaaatccaaattgcgacactattcatgtaatgcaaccaccgcatgataatatagaagattacctattcacttacgtggatatgaacaacaatagttattacttttctctacaacaacgattggaggatttagttcctgataagttatgggaaccagggtttatttcattcgaagacgctataaaaagagtttcaaaaatattcattaattctataataaactttaatgatctcgatgaaaataattttacaacggtaccactggtcatagattacgtaacaccttgtgcattatgtaaaaaacgatcgcataaacatccgcatcaactatcgttggaaaatggtgctattagaatttacaaaactggtaatccacatagttgtaaagttaaaattgttccgttggatggtaataaactgtttaatattgcacaaagaattttagacactaactctgttttattaaccgaacgaggagaccatatagtttggattaataattcatggaaatttaacagcgaagaacccttgataacaaaactaattttgtcaataagacatcaactacctaaggaatattcaagcgaattactctgtccaagaaaacgaaagactgtagaagctaacatacgagacatgttagtagattcagtggagaccgatacctatccggataaacttccgtttaaaaatggtgtattggacctggtagacggaatgttttactctggagatgatgctaaaaaatatacgtgtactgtatcaaccggatttaaatttgacgatacaaagttcgtcgaagacagtccagaaatggaagagttaatgaatatcattaacgatatccaaccattaacggatgaaaataagaaaaatagagagctatatgaaaaaacattatctagttgtttatgcggtgctaccaaaggatgtttaacattcttttttggagaaactgcaactggaaagtcgacaaccaaacgtttgttaaagtctgctatcggtgacctgtttgttgagacgggtcaaacaattttaacagatgtattggataaaggacctaatccatttatcgctaacatgcatttgaaaagatctgtattctgtagcgaactacctgattttgcctgtagtggatcaaagaaaattagatctgacaatattaaaaagttgacagaaccttgtgtcattggaagaccgtgtttctccaataaaattaataatagaaaccatgcgacaatcattatcgatactaattacaaacctgtttttgataggatagataacgcattaatgagaagaattgccgtcgtgcgattcagaacacacttttctcaaccttctggtagagaggctgctgaaaataatgacgcgtacgataaagtcaaactattagacgaggggttagatggtaaaatacaaaataatatatatagatttgcatttctatacttgttggtgaaatggtacaaaaaatatcatgttcctattatgaaactatatcctacacccgaagagattcctgactttgcattctatctcaaaataggtactctgttggtatctagctctgtaaagcatattccattaatgacggacctctccaaaaagggatatatattgtacgataatgtggtcactcttccgttgactactttccaacagaaaatatccaagtattttaattctagactatttggacacgatatagagagcttcatcaatagacataagaaatttgccaatgttagtgatgaatatctgcaatatatattcatagaggatatttcatctccgtaaatatatgctcatatatttatagaagatatcacatatctaaatgaataccggaatcatagatttatttgataatcatgttgatagtataccaactatattacctcatcagttagctactctagattatctagttagaactatcatagatgagaacagaagcgtgttattgttccatattatgggatcaggtaaaacaataatcgctttgttgttcgccttggtagcttccagatttaaaaaggtttacattctagtgccgaacatcaacatcttaaaaattttcaattataatatgggtgtagctatgaacttgtttaatgacgaattcatagctgagaatatctttattcattccacaacaagtttttattctcttaattataacgataacgtcattaattataacggattatctcgctacaataactctatttttatcgttgatgaggcacataatatctttgggaataatactggagaacttatgaccgtgataaaaaataaaaacaagattccttttttactattgtctggatctcccattactaacacacctaatactctgggtcatattatagatttaatgtccgaagagacgatagattttggtgaaattattagtcgtggtaagaaagtaattcagacacttcttaacgaacgcggtgtgaatgtacttaaggatttgcttaaaggaagaatatcatattacgaaatgcctgataaagatctaccaacgataagatatcacggacgtaagtttctagatactagagtagtatattgtcacatgtctaaacttcaagagagagattatatgattactagacgacagctatgttatcatgaaatgtttgataaaaatatgtataacgtgtcaatggcagtattgggacaacttaatctgatgaataatttagatactttatttcaggaacaggataaggaattgtacccaaatctgaaaataaataatggcgtgttatacggagaagaattggtaacgttaaacattagttccaaatttaaatactttattaatcggatacagacactcaacggaaaacattttatatacttttctaattctacatatggcggattggtaattaaatatatcatgctcagtaatggatattctgaatataatggttctcagggaactaatccacatatgataaacggcaaaccaaaaacatttgctatcgttactagtaaaatgaaatcgtctttagaggatctattagatgtgtataattctcctgaaaacgatgatggtagtcaattgatgtttttgttttcatcaaacattatgtccgaatcctatactctaaaagaggtaaggcatatttggtttatgactatcccagatactttttctcaatacaaccaaattcttggacgatctattagaaaattctcttacgccgatatttctgaaccagttaatgtatatcttttagccgccgtatattccgatttcaatgacgaagtgacgtcattaaacgattacacacaggatgaattaattaatgttttaccatttgacatcaaaaagctgttgtatctaaaatttaagacgaaagaaacgaatagaatatactctattcttcaagagatgtctgaaacgtattctcttccaccacatccatcaattgtaaaagttttattgggagaattggtcagacaatttttttataataattctcgtattaagtataacgataccaagttacttaaaatggttacatcagttataaaaaataaagaagacgctaggaattacatagatgatattgtaaacggtcacttctttgtatcgaataaagtatttgataaatctcttttatacaaatacgaaaacgatattattacagtaccgtttagactttcctacgaaccatttgtttggggagttaactttcgtaaagaatataacgtggtatcttctccataaaactgatgagatatataaagaaataaatgtcgagctttgttaccaatggatacctttccgttacattggaaccacacgagctgacgttagacataaaaactaatattaggaatgccgtatataagacgtatctccatagagaaattagtggtaaaatggccaagaaaatagaaattcgtgaagacgtggaattacctctcggcgaaatagttaataattctgtagttataaacgttccgtgtgtaataacctacgcgtattatcacgttggggatatagtcagaggaacattaaacatcgaagatgaatcaaatgtaactattcaatgtggagatttaatctgtaaactaagtagagattcgggtactgtatcatttagcgattcaaagtactgcttttttcgaaatggtaatgcgtatgacaatggcagcgaagtcactgccgttctaatggaggctcaacaaggtatcgaatctagttttgtttttctcgcgaatatcgtcgactcataaaaaagagaatagcggtaagtataaacacgaatactatggcaataattgcgaatgttttattctcttcgatatatttttgataatatgaaaaacatgtctctctcaaatcggacaaccatctcataaaatagttctcgcgcgctggagaggtagttgccgctcgtataatctctccagaataatatacttgcgtgtcgtcgttcaatttatacggatttctatagttctctgttatataatgcggtttgccctcatgattagacgacgacaatagtgttctaaatttagatagttgatcagaatgaatgtttattggcgttggaaaaattatccatacagcgtctgcagagtggttgatagttgttcctagatatgtaaaataatccaacttactaggcagcaaattgtctagataaaatactgaatcaaacggtgcagacgtattggcggatctaatggaatccaattgattaactatcttttgaaaatatacatttttatgatccaatacttgtaagaatatagaaataatgataagtccatcatcgtgtttttttgcctcttcataagaactatattttttcttattccaatgaacaagattaatctctccagagtatttgtacacatctatcaagtgattggatccataatcgtcttcctttccccaatatatatgtagtgatgataacacatattcattggggagaaaccctccacttatatatcctcctttaaaattaatccttactagttttccagtgttctggatagtggttggtttcgactcattataatgtatgtctaacggcttcaatcgcgcgttagaaattgcttttttagtttctatattaataggagatagttgttgcggcatagtaaaaatgaaatgataactgtttaaaaatagctcttagtatgggaattacaatggatgaggaagtgatatttgaaactcctagagaattaatatctattaaacgaataaaagatattccaagatcaaaagacacgcatgtgtttgctgcgtgtataacaagtgacggatatccgttaataggagctagaagaacttcattcgcgttccaggcgatattatctcaacaaaattcagattctatctttagagtatccactaaactattacggtttatgtactacaatgaactaagagaaatctttagacggttgagaaaaggttctatcaacaatatcgatcctcactttgaagagttaatattattgggtggtaaactagataaaaaggaatctattaaagattgtttaagaagagaattaaaagaggaaagtgatgaacgtataacagtaaaagaatttggaaatgtaattctaaaacttacaacacgggataaattatttaataaagtatatataagttattgcatggcgtgttttattaatcaatcgttggaggatttatcgcatactagtatttacaatgtagaaattagaaagattaaatcattaaatgattgtattaacgacgataaatacgaatatctgtcttatatttataatatgctagttaatagtaaatgaacttttacagatctagtataattagtcagattattaagtataatagacgactagctaagtctattatttgcgaggatgactctcaaattattacactcacggcattcgttaaccaatgcctatggtgtcataaacgagtatccgtgtccgctattttattaactactgataacaaaatattagtatgtaacagacgagatagttttctctattctgaaataattagaactagaaacatgtttagaaagaaacgattatttctgaattattccaattatttgaacaaacaggaaagaagtatactatcgtcatttttttctctagatccagctactactgataatgatagaatagacgctatttatccgggtggcatacccaaaaggggtgagaatgttccagagtgtttatccagggaaattaaagaagaagttaatatagacaattcttttgtattcatagacactcggttttttattcatggcatcatagaagataccattattaataaattttttgaggtaatcttctttgtcggaagaatatctctaacgagtgatcaaatcattgatacatttaaaagtaatcatgaaatcaaggatctaatatttttagatccgaattcaggtaatggactccaatacgaaattgcaaaatatgctctagatactgcaaaacttaaatgttacggccatagaggatgttattatgaatcattaaaaaaattaactgaggatgattgattaaaaaatataaattaatttaccatcgtgtatttttataacgggattgtccggcatatcatgtagatagttaccgtctacatcgtatactcgaccatctacgcctttaaatcctctatttattgacattaatctattagaattggaataccaaatattagtaccctcaattagtttattggtaatattttttttagacgatagatcgatggctcttgaaaccaaggttttccaaccggactcattgtcgatcggtgagaagtctttttcattagcatgaatccattctaatgatgtatgtttaaacactctaaacaattggacaaattcttttgatttgctttgaatgatttcaaataggtcttcgtctacagtaggcataccattagataatctagccattataaagtgcacgtttacatatctacgttctggaggagtaagaacgtgactattgagacgaatggctcttcctactatctgacgaagagacgcctcgttccatgtcatatctaaaatgaagatatcattaattgagaaaaaactaataccctcgcctccactagaagagaatacgcatgttttaatgcattctccgttagtgtttgattcttggttaaactcagccaccgccttgattctagtatcttttgttctagatgagaactctatattagagataccaaagactttgaaatatagtaataagatttctattcctgactgattaacaaatggttcaaagactagacatttaccatgggatgctaatattcccaaacatacatctataaatttgacgcttttctcttttaattcagtaaatagagagatatcagccgcactagcatcccctttcaatagttctccctttttaaaggtatctaatgcggatttagaaaactctctatctcttaatgaatttttaaaatcattatatagtgttgctatctcttgcgcgtattcgcccggatcacgattttgtctttcaggaaagctatcgaacgtaaacgtagtagccatacgtctcagaattctaaatgatgatatacctgtttttatttcagcgagtttagccttttgataaatttcttcttgctttttcgacatattaacgtatcgcattaatactgttttcttagcgaatgatgcagacccttctacgtcatcaaaaatagaaaactcgttattaactatatacgaacatagtcctcctagtttggagactaattctttttcatcgactagacgtttattctcaaatagcgattggtgttgtaaggatcctggtcgtagtaagttaaccaacatggtgaattcttgcacactattgacgataggtgtagccgataaacaaatcatcttatggttttttaacgcaatggtcttagataaaaaattatatactgaacgagtaggacggatcttaccatcttctttgattaatgatttagaaatgaagttatgacattcatcaataatgacgcatattctactcttggaattaatagttttgatattagtaaaaaatttatttctaaaattttgatcatcgtaattaataaaaatacaatccttcgttatctctggagcgtatctgagtatagtgttcatccaaggatcttctatcaaagcctttttcaccaataagataatagcccaattcgtataaatatccttaagatgtttgagaatatatacagtagtcattgttttaccgacacccgtttcatggaacaataaaagagaatgcatactgtctaatcctaagaaaactcttgctacaaaatgttgataatccttgaggcgtactacgtccgaccccatcatttcaacgggcatattagtagttctgcgtaaggcataatcgatataggccgcgtgtgatttactcatttatgagtgataagtaataactatgttttaaaaatcacagcagtagtttaactagtcttctctgatgtttgttttcgatactttttgaatcagaagtcatactagaataaagcaacgagtgaacgtaatagagagcttcgtatactctattcgaaaactctaagaacttattaatgaattccgtatccactggattgtttaaaatactaaattgaacactgttcacatccttccaagaagaagacttagtgacggacttaacatgagacataaataaatccaaattttttttacaaacatcactagccaccataatggcgctatctttcaaccagctatcgcttacgcattttagcagtctaacatttttaaagagactacaatatattctcatagtatcgattacacctctaccgaataaagttggaagtttaataatacaatatttttcgtttacaaaatcaaataatggtcgaaacacgtcgaaggttaacatcttataatcgctaatgtatagattgttttcagtgagatgattattagatttaatagcatctcgttcacgtttgaacagtttattgcgtgcgctgaggtcggcaactacggcgtccgctttagtactcctcccataatactttacgctattaatctttaaaatttcatagactttatctagatcgctttctggtaacatgatatcatgtgtaaaaagttttaacatgtcggtcggcattctatttagatcattaactctagaaatctgaagaaagtaattagctccgtattccagactaggtaatgggcttttacctagagacagattaagttctggcaatgtttcataaaatggaagaaggacatgcgttccctcccggatattttttacaatttcatccatttacaactctatagtttgttttcattattattagttattatctcccataatcttggtaatacttaccccttgatcgtaagataccttatacaggtcattacatacaactaccaattgtttttgtacataatagattggatggttgacatccatggtggaataaactactcgaacagatagtttatctttccccctagatacattagccgtaatagttgtcggcctaaagaatatctttggtgtaaagttaaaagttagggttcttgttccattattgctttttgtcagtagttcattataaattctcgagatgggtccgttctctgaatatagaacatcatttccaaatctaacttctagtctagaaataatatcggtcttattcttaaaatctattcccttgatgaagggatcgttaatgaacaaatccttggcctttgattcggctgatctattatctccgttatagacgttacgttgactagtccaaagacttacaggaatagatgtatcgatgatgttgatactatgtgatatgtgagcaaagattgttctcttagtggcatcactatatgttccagtaatggcggaaaactttttagaaatgttatatataaaagaattttttcgtgttccaaacattagcagattagtatgaagataaacactcatattatcaggaacattatcaatttttacatacacatcagcatcttgaatagaaacgataccatcttctggaacctctacgatctcggcagactccggataaccagtcggtgggccatcgctaacaataactagatcatccaacaatctactcacatatgcatctatataatctttttcatcttgtgagtaccctggatacgaaataaatttattatccgtatttccataataaggtttagtataaacagagagagatgttgccgcatgaacttcagttacagtcgccgttggttggtttatttgacctattactctcctaggtttctctataaacgatggtttaatttgtacattcttaaccatatatccaataaagctcaattcaggaacataaacaaattctttgttgaacgtttcaaagtcgaacgaagagtcacgaataacgatatcggatactggattgaaggttaccgttacggtaatttttgaatcggatagtttaagactgctgaatgtatcttccacatcaaacggagttttaatataaacgtatactgtagatggttctttaatagtgtcattaggagttaggccaatagaaatatcattaagttcactagaatatccagagtgtttcaaagcaattgtattattgatacaattattatataattcttcgccctcaatttcccaaataacaccgttacacgaagagatagatacgtgattaatacatttatatccaacatatggtacgtaactgaatcttcccatacctttaacttctggaagttccaaactcagaaccaaatgattaagcgcagtaatatactgatccctaatttcgaagctagcgatagcctgattgtctggaccatcgtttgtcataactccggatagagaaatatattgcggcatatacaaagttggaatttgactatcgactgcgaagacattagaccgtttaatagagtcatccccaccgatcaaagaattaatgatagtattattcattttctatttaaaatggaaaaagcttacaataaactccgtagagaaatatctataatttgtgagttttccttaaagtaacagcttccgtaaacgccgtctttatctcttagtaggtttattgtatttatgaccttttccttatcttcatagaatactaaaggcaacaaagaaatttttggttcttctctaagagctacgtgagacttaaccatagaagccaacgaatccctacatattttagaacagaaataccctacttcaccacccttgtatgtctcaatactaataggtctaaaaaccaaatcttgattacaaaaccaacacttatcaattacactatttgtcttaatagacacatctgccatagatttataatactttggtagtatacaagcgagtgcttcttctttagcgggcttaaagactgctttaggtgctgaaataaccacatctggaaggcttactcgcttagccatttaattacggaactatttttttatacttctaatgagcaagtagaaaacctctcatctacaaaaacgtactcgtgtccataatcctctaccatagttacacgttttttagatctcatatgtgctaaaaagttttcccatactaattggttactattatttttcgtataatttttaacagtttgaggttttagatttttagttacagaagtgatatcgaatattttatccaaaaagaatgaataattaattgtcttagaaggagtgttttcttggcaaaagaataccaagtgcttaaatatttctactacttcattaatcttttctgtactcagattcagtttctcatcttttacttgattgattatttcaaagactaacttataatcctttttatttattctctcgttagccttaagaaaactagatacaaaatttgcatctacatcatccgtggatatttgatttttttccatgatatccaagagttccgagataatttctccagaacattgatgagacaataatctccgcaatacatttctcaaatgaataagtttattagacacgtggaagtttgactttttttgtacctttgtacatttttgaaataccgactcgcaaaaaatacaatattcatatccttgttcagatactataccgttatgtctacaaccgctacataatcgtagattcatgttaacactctacgtatctcgtcgtccaatattttatataaaaacattttatttctagacgttgccagaaaatcctgtaatatttttagttttttgggctgtgaataaagtatcgccctaatattgttaccgtcttccgccaatatagtagttaaattatccgcacatgcagaagaacaccgcttaggcggattcagtacaatgttatatttttcgtaccaactcatttaaatatcataatctaaaatagttctgtaatatgtctagcgctaatatattgatcataatcctgtgcataaattaagatacaacaatgtctcgaaatcatcgacatggcttcttccatagttagaagatcgtcgtcaaagttagcaacgtgattcatcaacatttgctgttttgaggcagcaaatactgaaccgtcgccattcaaccattcataaaaaccatcgtctgaatccattgataatttcttgtactggtttttgagagctcgcatcaatctagcatttctagctcccggattgaaaacagaaagaggatcgtacatccagggtccattttctgtaaatagaatcgtataatgtcccttcaagaagatatcagacgatccacaatcaaagaattggtctccgagtttgtaacaaactgcggactttaacctatacatgataccgtttagcataatttctggtgatacgtcaatcggagtatcatctattagagatctaaagccggtgtaacattctccaccaaacatattcttattctgacgtcgttctacataaaacatcattgctccattaacgataacaggggaatgaacagcactacccatcacattagttcccaatggatcaatgtgtgtaactccagaacatcttccatagcctatgttaggaggagcgaacaccactcttccactattgccatcgaatgccatagaataaatatccttggaattgatagaaatcggactgtcggatgttgtgatcatcttcataggattaacaactatgtatggtgccgcctgaagtttcatatcgtaactgatgccgtttataggtctagccacagaaaccaacgtaggtctaaatccaactatagacaaaatagaagccaatatctgttcctcatctgtcataacttgagagcatccagtatgaataatcttcattagatggggatctaccgcatcatcatcgttacaataaaaaattcccattctaatgttcataattgcttttctaatcatggtatgcatgtttgctctctgaatctctgtggaaattagatctgatacacctgtaatcactatcggattatcctccgtaagacgattaaccaacaacatataattataagactttacttttctaaattcataaagttgctggattaggctataggtgtctccatgtacatacgcgttctcgagcgcaggaagtttaataccgaatagtgccatcagaataggatgaatatagtaattagtttctggttttctataaataaaagacaaatcttgtgaactagacatatcggtaaaatgcatggattggaatcgtgtagtcgacagaagaatatgatgattagatggagagtatattttatctaactctttgagttggtcaccgattctaggactagctcgagaatgaataagtactaaaggatgagtacatttcacagaaacactagcattgttcaatgtgctctttacatgggtaaggagttgaaatagctcgtttctatttgttctgacaatatttagtttattcataatgttaagcatatcctgaatagtaaagttagatgtgtcatacttgttagtagttagatatttagcaattgcattcccatcatttctcaatctcgtactccaatcatgcgtggatgctacttcgtcgatggaaaccatacaatcctttttgataggctgttgagattgatcatttcctgcacgtttaggtttggtacgttgatttctagcccctgcggatataaagtcatcgtctacaatttgggacaatgaattgcatacactacaagacaaagatttatcagaagtgtgaatatgatcttcatctaccaaagaaagagtttgattagtataactagattttagtcctgcgttagatgttaaaaaaacatcgctattgaccacggcttccattatttatattcgtagtttttactcgaaagcgtgattttaatatccaatcttattacttttggaatcgttcaaaacctttgactagttgtagaatttgatctattgccctacgcgtatactcccttgcatcatatacgttcgtcaccagatcgtttgtttcggcctgaagttggtgcatatctctttcaacattcgacatgagatccttaagggccatatcgtctagattttgttgagatgctgctcctggatttggattttgttgtgctgttgtacatactgtaccaccagtaggtgtaggagtacatacagtggccacaataggaggttgagaaagtgtaaccgttggagtagtacaagaaatacttccatccgattgttgtgtacatgtagttgttggtaacgtctgagaaggttgggtagatggcggcgtcgtcgttttttgatctttattaaatttagagataatatcctgaacagcattgctcggcgtcaacgctggaaggagtgaactcgccggcgcatcagtatcttcagacagccaatcaaaaagattagacatatcagatgatgtattagtttgttgtcgtggttttggtgtaggagcagtactactaggtagaagaataggagccgatgtagctgttggaaccggctgtggagttatatgaatagttggttgtagcggttggataggctgtctgctggcggccatcatattatctctagctagttgttctcgcaactgtctttgataatacgactcttgagactttagtcctatttcaatcgcttcatcctttttcgtatccggatccttttcttcagaataatagattgacgactttggtgtagaggattctgccagcctctgtgagaacttgttaaagaagtccatttaaggctttaaaattgaattgcgattataagattaaatggcagacacagacgatattatcgactatgaatccgatgatctcaccgaatacgaggatgatgaagaagaggaagaagatggagagtcactagaaactagtgatatagatcccaaatcttcttataagattgtagaatcagcatccactcatatagaagatgcgcattccaatcttaaacatatagggaatcatatatctgctcttaaacgacgctatactagacgtataagtctatttgaaatagcgggtataatagcagaaagctataacttgcttcaacgaggaagattacctctagtttcagaattttctgacgaaacgatgaagcaaaatatgctacatgtaattatacaagagatagaggagggttcttgtcctatagtcatcgaaaagaacggagaattgttgtcggtaaacgattttgacaaagatggtctaaaattccatctagactatattatcaaaatttggaaacttcaaaaacgatattagaatttatacgaatatcgttctctaaatgtcacaatcaagtctcgcatgttcagcaatttattgtcgtactttatatcgtgttcattaacgatatcttgcaaaatagtaatgattctatcttccttcgatagatattcttcagagattattgtcttatattctttcttgttatcagatatgaatttgataagactttgaacattattgatacccgtctgtttaattttttctacagatattttagttttggcagattctatcgtatctgtcaatagacatccaacatcgacattcgacgtcaattgtctataaatcaacgtataaattttagaaataacattagcgaattgttgtgcgttgatgtcgttattctgaaacagtatgattttaggtagcattttcttaacaaagagaacgtatttattgttactcagttgaacagatgatatatccagattactaacgcatctgattccgtataccaaactttcagaagaaatggtatacaattgtttgtattcattcaatgtctctttttcagaaattagtttagagtcgaatactgcaataattttcaagagatagttttcatcagataagattttatttagtgtagatatgataaaactattgttttgttggagaacttgatacgccgcgttctctgtagtcgacgctctcaaatgggaaacaatctccattatttttttggaatcggatactatatcttcggtatcttgacgcagtctagtatacatagagttaagagagattagagtttgtacattaagcaacatgtctctaaatgtggctacaaacttttcctttttcacatcatctagtttattatataccgatttcacaacggcaccagatttaaggaaccagaatgaaaaactctgataactacaatatttcatcatagttacgattttatcatcttctatagttggtgtaatagcgcatacctttttctccaagactggaaccaacgtcataaaaatgtttaaatcaaaatccatatcaacatctgatgcgctaagaccagtctcgcgttcaagattatctttactaatggtgacgaactcatcgtataaaactctaagtttgtccattatttatttacagatttagttgtttaatttatttgtgctcttccagagttgggatagtatttttctaacgtcggtattatattattaggatctacgttcatatgtatcataatattaatcatccacgttttgataaatctatctttagcttctgaaataacgtatttaaacaaaggagaaaaatatttagctacggcatcagacgcaataacattttttgtaaatgtaacgtatttagacgacagatcttcgttaaaaagttttccatctatgtagaatccatcggttgttaacaccattcccgcgtcagattgaataggagtttgaatagtttgttttggaaatagatccttcaataacttatagttgggtgggaaaaaatcgattttatcactagactctttcttttttactatcattacctcatgaactatttcttgaatgagtatatgtattttctttcctatatcggacgcgttcattggaaaatataccatgtcgttaactataagaatatttttatcctcgtttacaaactgaataatatcagatgtagttcgtaaacgaactatatcatcaccagcacaacatctaactatatgatatccactagtttcctttagccgtttattatcttgttccatattagcagtcattccatcatttaagaaggcgtcaaaaataatagggagaaatgacattttggattctgttacaactttaccaaaattaaggatatacggacttactatctttttctcaacgtcaatttgatgaacacacgatgaaaatgtgcttctatgagattgatcatgtagaaaacaacaagggatacaatatttccgcatatcatgaaatatattaagaaatcccaccttattatatttccccaaaggatccatgcacgtaaacattatgccgttatcattaataaagacttctttctcatcggatctgtaaaagttgttactgatttttttcattccaggatctagataattaataatgatgggttttctattcttattctttgtattttggcatatcctagaccagtaaacagtttccactttggtaaaatcagcagacttttgaacgctattaaacatggcattaatggcaataactaaaaatgtaaaatatttttctatgttaggaatatggtttttcactttaatagatatatggtttttggccaaaatgatagatatttttttatccgaggatagtaaaatattattagtcgccgtctctataaaaatgaagctagtctcgatatccaattttattctagaattgataggagtcgccaaatgtaccttatacgttatatctcccttgatgcgttccatttgtgtatctatatcggacacaagatctgtaaatagttttacgttattaatcatcacggtatcgccgtcgctagataacgctaatgtaccatccaagtcccaaatggagagatttaactgttcatcgtttagaataaaatgattaccggtcatattaataaagtgttcatcgtatctagataacaacgacttataattaatgtccaagtcttgaactcgctgaatgatcttttttaacccagttagttttagattggtacgaaatatattgttaaactttgattctacagtaatgtccaaatctagttgtggaaatacttccatcaacattgtttcaaacttgataatattattatctacatcttcgtacgatccaaattccggaatagatgtatcgcacgctctggccacccagataaccaaaaagtcacacgctccaggatatacattgtataaaaagctatcgttttttagtagggtttttttctgcgtgtatacgaagggattaaaaatagtattatcaacgtaactatattccaaattattcttatgagaatagataataatatcgtccttaatatctaacaaatttcctaaatatccctttaattgagtcattcgaagcgtcaatagaatatgtctcttaactatttccggctgttgtatatttaaatgacttcgtaaaaaataatatatgggcgacttctcatctatgtaatcatatggagtgagatatagggctcgttctacctcctgccccttacccacctgtaataccaattgcggacttactatatatcgcatatttatatcgtggggtaaagtgaaaatctactaccgatgatgtaagtcttacaatgttcgaaccagtaccagatcttaatttggaggcctccgtagaactaggggaggtaaatatagatcaaacaacacctatgataaaggagaatagcggttttatatcccgcagtagacgtctattcgcccatagatctaaggatgatgagagaaaactagcactacgattctttttacaaagactttattttttagatcatagagagattcattatttgttcagatgcgttgacgctgtaaaagacgtcactattaccaaaaaaaataacattatcgtggcgccttatatagcacttttaactatcgcatcaaaaggatgcaaacttacagaaacaatgattgaagcattctttccagaactatataatgaacatagtaagaaatttaaattcaactctcaagtatccatcatccaagaaaaactcggataccagtttggaaactatcacgtttatgattttgaaccgtattactctacagtagctctggctattcgagatgaacattcatctggcatttttaatatccgtcaagagagttatctggtaagttcattatctgaaataacatatagattttatctaattaatctaaaatctgatcttgttcaatggagtgctagtacgggcgctgtaattaatcaaatggtaaatactgtattgattacagtgtatgaaaagttacaactggtcatagaaaatgattcacaatttacatgttcattggctgtggaatcaaaacttccaataaaattacttaaagatagaaatgaattatttacaaaattcattaacgagttaaaaaagaccagttcattcaagataagcaaacgcgataaggatacgctactaaaatattttacttaggactggagttagaatttatagacgactcatttcgtttatcattgttactattattactattactatcattattagtgttggcattattagtattcttcttgtcatcttgttcagaaatatacagcaatgctatacctaatactaaatacattatcatgctcgcaatggctctaacaacaacgaaccaaaatgaatttggtcgtagcttttgttcacaaaaatacataaagaaatgtctacataaatctatggcgccattggctacttgaaatagcgccagtcctcctacagattttaatatagctgtataacatgacatttattcatcatcaaaagagacagagtcaccatctgtcatatttagattttttttcatgtgttcaaagtatcctctactcatttcattataatagtttatcatacttagaattttaggacggatcaatgagtaagacttgactagatcgtcagtagtaatttgtgcatcgtctattctgcatccgcttcgtcgaataatgtatagcatcgctttgagattctccatagctatcaagtctttatacaatgacatggaaatatctgtgaatactttatacttctccaacatcgatgccttaacatcatcgcctactttagcattgaaaatacgttctattgtgtagatggatgtagcaagatttttaaacaacaatgccatcttacacgatgattgcctcaagtctccaatcgtttgtttagaacgattagctacagagtccaatgcttggctgactagcatattattatctttagaaattgtattcttcaatgaggcgtttatcatatctgtgatttcgttagtcatattacagtctgactgggttgtaatgttatccaacatatcacctatggatacggtacacgtaccagcatttgtaataatcctatctaagatgttgtatggcattgcgcagaaaatatcttctcctgtaatatctccactctcgataaatctactcagattattcttaaatgccttattctctggagaaaagatatcagtgtccatcatttcattaatagtatacgcagaaaagataccacgagtatcaattctatccaagatacttatcggttccgagtcacagataatggtttcctctccttcgggagatcctgcatagaaatatctaggacaatagtttctatactgtctgtaactctgataatctctaaagtcactaactgataccatgaaattgagaagatcaaacgctgaagtaattaatttttctgcctcgtttttactacaactagttttcatcaatgtagtgacgatgtattgtttagttacttttggtctaatactgatgatagagatattattgcttcccataatggatcttctagtagtcaccttaaagcccattgatgcgaatagcagatagataaagtcttggtatgactcctttctaatatagtacggactacctttgtcacccaactttatacccacataagccataacaacctctttaatagccgtttcatgaggtttatcagccatgagcctgagtagttggaagaatctcatgaatcccgtctcagaaagtcctatatgcatgatagatttatctttcctgggaaactctcgtatagtcatagatgaaatactctttaaagtttctgaaataagattagtaacagtcttacctccgactactctaggtaacaaacaaactctaataggtgttttctctgcggagataatatcagaaaggatagagcaataagtagtattattgtgattataaagaccgaatacataacaggtagaatttataaacatcatgtcctgaaggtttttagacttgtattcctcgtaatccataccgtcccaaaacatggatttggtaactttgatagccgtagatctttgttccttcgccaacaggttaaagaaattaataaagaatttgttgtttctatttatgtccacaaattgcacgtttggaagcgccacggttacattcactgcagcattttgaggatcgcgagtatgaagtacgatgttattgtttactggtatatctggaaagaaatctaccagtctaggaataagagattgatatcgcatagaaatagtaaagtttataatctcatcatcgaagagcattttgttaccattgtaataaatatccactctgtcatatgtataaatgaagtactgttcaaacatgatgagatgtttatatgttggcatagtagtgagatcgacgtttggtaatggcaatgtattaagattaactccataatgtctagcagcatctgcgatgttataagcgtcgtcaaagcggggtcgatcttgtattgttatatattgtctaacacctataagattatcaaaatcttgtctgcttaatacaccgttaacaatttttgccttgaattcttttattggtgcattaataacatccttatagaggatgttaaacaaataagtgttatcaaagttaagatctggatatttcttttctgctagaacatccattgagtcggagccatctggtttaatataaccaccgataaatctagctctgtattctgtatccgtcaatctaatattaagaaggtgttgagtgaaaggtggaagatcgtaaaagctgtgagtattaatgataggattagtttccgaactaatgttaattggggtattaataatatctatatttccagcgttaagtgtaacattaaacagttttaattcacgtgacgtggtatcaattaaataattaatgcccaatttggatatagcagcctgaagctcatcttgtttagttacggatcctaatgagttattaagcaatatatcgaacggatgaacgaaggttgttttaagttggtcacatactttgtaatctagacatagatgcggaagaacggtagaaactatacgaaataaatattcagagtcctctaattgatcaagagtaactattgacttaataggcatcatttatttagtattaaatgacgaccgtaccagtgacggatatacaaaacgatttaattacagagttttcagaagataattatccatctaacaaaaattatgaaataactcttcgtcaaatgtctattctaactcacgttaacaacgtggtagatagagaacataatgccgccgtagtgtcatctccagaggaaatatcctcacaacttaatgaagatctatttccagatgatgattcaccggccactattatcgaacgagtacaacctcatactactattattgacgatactccacctcctacgtttcgtagagagttattaatatcggaacaacgtcaacaacgagaaaaaagatttaatattacagtatcgaaaaatgctgaagcaataatggaatctagatctatgataacttctatgccaacacaaacaccatccttgggagtagtttatgataaagataaaagaattcagatgttagaggatgaagtggttaatcttagaaatcaacgatctaatacaaaatcatctgataatttagataattttaccaaaatactatttggtaagactccgtacaaatcaacagaagttaataagcgtatagccatcgttaattatgcaaatttgaacgggtcccccttatcagtcgaggacttggatgtttgttcggaggatgaaatagatagaatctataaaacgattaaacaatatcacgaaagtagaaaacgaaaaattatcgtcactaacgtgattattattgtcataaacattatcgagcaggcattgctaaaactcggatttgaagaaatcaaaggactgagtaccgatatcacttcagaaattatcgatgtggagatcggagatgactgcgatgctgtagcatctaaactaggaatcggtaacagtccggttcttaatattgtattgtttatactcaagatattcgttaaacgaattaaaattatttaatttaatacattcccatatccagacaacaatcgtctggattaatctgttcctgtcgtctcataccggacgacatattaatctttttattagtgggcatctttttagatggtttctttttcccagcattaactgagtcgatacctagaagatcgtgattgatctctccgaccattccacgaacttctaattggccgtctctgacggtaccataaactattttaccagcattagtaacagcttggacaatctgaccatccatcgcattgtacgatgtagtagtaactgttgttctacgtctaggagcaccagaagtatttttggagcccttggatgttgatgtagaagaagacgaggattttgattttggtttacatgtaatacattttgaactctttgattttgtatcacatgcgccggcagtcacatctgtttgagaattaagattattgttgcctcctttgacggctgcatctccaccgatttgcgctagtagatttttaagctgtggtgtaatcttattaactgtttcgatataatcatcgtaactgcttctaacggctaaattttttttatccgccatttagaagctaaaaatatttttatttatgcagaagatttaactagattatacaatgaactaatatgatccttttccagattatttacaaacttggtattttttggttctggaggaggcgaatttaaattcggacttggattcggattttgtaagttcttgatcttattatacatcgagtataggatggcgacagtaactgctacacaaataccgatcaaaagaagaataccaatcatttattgacaataacttcactattgatcaagtatgcaatatatcatcttttcactaaataagtagtaataatgattcaacaatgtcgagatatatggacgataataatttagttcatggaaatatcgctatgattggtgtgaatgactccgctaactctgtggggtgcgcagtgctttccccacatagaataaattagcattccgactgtgataataataccaagtataaacgccataatactcaatactttccatgtacgagtgggactggtagacttactaaagtcaataaaggcgaagatacacgaaagaatcaaaagaatgattccagcgattagcacgccggaaaaataatttccaatcataagcatcatgtccatttaactaataaaaattttaaatcgccgaatgaacaaagtggaatataaaccatataaaaacaatagtttgtactgcaaaaataatatctatttttgttttcgaagatatggtaaaattaaatagtagtacacagcatgttataactaacagcagcaacggctcgtaattacttatcatttactagacgaaaaggtggtgggatattttcttgctcaaataatacgaatatatcacccatccattttatgcgatgtttatatactctaatctttaatagatctatagacgacgggtttaccaacaatatagattttatcgattcatctaatttaaacccttccttaaacgtgaatgatctattatctggcataacgatgaccctacctgatgaatcggacaatgtactgggccatgtagaataaattatcaacgaattatcgtctacgaacatttatatcatttgttttaattttaggacgcgaataaatggatataaaatagaaaataacagatattacaaccagtgttatggccgcgcccaaccaggtaggcagttttattttatcttttactacaggttctcctggatgtacgtcaccaacggcggacgtagttctagtacaattagacgtaagttccgcttgggaattttttaacgctaaagagttaacgttaatcgtgcacccaacgtatttacatctagttcgttgaacatcttgattataatataaccattttctatctctagattcgtcagtgcactcatgtaaccaacataccctaggtcctaaatatttatctccggaattagattttggataattcgcgcaccaacaatttctatttcctttatgatcgttacaaaagacgtataatgccgtatccccaaaagtaaaataatcaggacgaataattctaataaactcagaacaatatctcgcatccatatgtttggagcaaatatcggaataagtagacatagccggtttccgttttgcacgtaaccattctaaacaattggggtttccaggatcgtttctacaaaatccagtcatgaaatcgtcacaatgttctgtcttgtaattattattaaatatttttggacagtgtttggtatttgtcttagaacaacattttgccacgctatcactatcgcccaggagataatccttttttataaaatgacatcgttgcccggatgctatataatcagtagcgtgttttaaatccttaatatattcaggagttacctcgttctgataatagattaatgatccaggacgaaatttgaaagaactacatggttctccatgaattaatacatattgtttagcaaattcaggaactataaaactactacaatgatctatcgacataccatctatcaaacaaaacttgggtttaatttctcccggagatgtttcataatagtacgtataactttcttctgcaaacttaacagctctattatattcaggataattaaaacctaattccatatatttgtctcgtatatctgctattcctggtgctattttgattctattaagagtaacagctgcccccattcttaataatcgtcagtatttaaactgttaaatgttggtatatcaacatctaccttatttcccgcagtataaggtttgttgcaggtatactgttcaggaatggttacatttatacttcttctatagtcctgtctttcgatgttcatcacatatgcaaagaacagaataaacaaaataatgtaagaaataatattaaatatctgtgaattcgtaaatacattgattgccataataattacagcagctacaatacacacaatagacattcccacagtgttgccattacctccacgatacatttgagttactaagcaataggtaataactaagctagtaagaggcaatagaaaagatgagataaatatcatcaatatagagattagaggagggctatatagagccaagacgaacaaaatcaaaccgagtaacgttctaacatcattatttttgaagattcccaaataatcattcattcctccataatcgttttgcatcatacctccatctttaggcataaacgattgctgctgttcctctgtaaataaatctttatcaagcactccagcacccgcagagaagtcgtcaagcatattgtaatatcttaaataactcatttatatattaaaaaatgtcactattaaagatggagtataatctttatgccgaactaaaaaaaatgacttgtggtcaacccctaagtctttttaacgaagacggggatttcgtagaagttgaaccgggatcatcctttaagtttctgatacctaagggattttacgcctctccttccgtaaagacgagtctagtattcgagacattaacaacgaccgataataaaatcactagtatcaatccaacaaatgcgccaaagttatatcctcttcaacgcaaagtcgtatctgaagtagtttctaatatgaggaaaatgatcgaatcaaaacgtcctctatacatcactcttcacttggcgtgtggatttggtaagactattaccacgtgttatcttatggctacacacggtagaaaaaccgtcatttgcgtacccaataaaatgttaatacatcaatggaagacacaggtagaggcagtcggattggaacataagatatccatagatggagtaagtagtctattaaaggaactaaagactcaaagtccggatgtattaatagtagtcagtagacatctgacaaacgatgccttttgtaaatatatcaataagcattatgatttgttcatcttggatgaatcacatacgtataatctgatgaacaatacagcagttacaagatttttagcgtattatcctccgatgatgtgttattttttaactgctacacctagaccatctaaccgaatttattgtaacagtattattaatattgccaagttatccaatctaaaaaaaactatctatgcagtagatagtttttttgagccatattccacagataatattagacatatggtaaaacgactagatggaccatctaataaatatcatatatataccgagaagttattatctgtagacgagcctagaaatcaacttattcttgataccctggtagaagaattcaagtcaggaactattaatcgcattttagttattactaaactacgtgaacatatggtattattctacaaacgattattagattttttcggaccagaggttgtatttataggagacgcccaaaatagacgtactccagatatggtcaaatcaatcaaggaactaaatagatttatattcgtatccaccttattttattccggtactggtttagatattcctagtttggattcgttgttcatttgctcggcagtaatcaacaatatgcaaatagagcaattactagggagggtatgtcgagaaacagaactattagataggacggtatatgtatttcctaacacatccatcaaagaaataaagtacatgataggaaatttcatgcaacgaattattagtctgtctgtagataaactaggatttaaacaaaaaagttatcggaaacatcaagaatccgatcccacttctgcatgtacaacatcatccagagaagaacgtgtattaaatagaatatttaactcgcaaaatcgttaagaagtttaagcgacgatccgcatgctgcgcaggccagtgtattacccctcatagtattaatataatccaatgatacttttgtgatgtcggaaatcttaaccaatttagactgacaggcagaacacgtcatgcaatcatcatcgtcatcgataactgtagtcttgggcttctttttgcgactcttcattccggaacgcacattggtgctatccatttaggtagtaaaaaataagtcagaatatgccctataacacgatcgtgcaaaacctggtatatcgtctctatctttatcacaatatagtgtatcgacatttttattattattgacctcgtttatcttggaacatggaatgggaacatttttgttatcaacggccatctttgccttaattccagatgttgtaaaattataactaaacagtctatcatcgacacaaatgaaattcttgtttagacgtttgtagtttacgtatgcggctcgttcgcgtctcattttttcagatattgcaggtactataatattaaaaataagaatgaaataacataggattaaaaataaagttatcatgacttctagcgctgatttaactaacttaaaagaattacttagtctgtacaaaagtttgagattttcagattctgcggctatagaaaagtataattctttggtagaatggggaacatctacttactggaaaataggcgtgcaaaaggtagctaatgtcgagacgtcaatatctgattattatgatgaggtaaaaaataaaccgtttaatattgatccgggctattacattttcttaccggtatattttgggagcgtctttatttattcgaagggtaaaaatatggtagaacttggatctggaaactcttttcaaataccagatgatatgcgaagtgcgtgtaacaaagtattagacagcgataacggaatagactttctgagatttgttttgttaaacaatagatggataatggaagatgctatatcaaaatatcagtctccagttaatatatttaaactagctagtgagtacggattaaacatacccaaatatttagaaattgaaatagaggaagacacattatttgacgacgagttatactctattatagaacgctctttcgatgataaatttccaaaaatatccatatcgtatattaagttgggagaacttagacggcaagttgtagactttttcaaattctcattcatgtatattgagtccatcaaggtagatcgtataggagataatatttttattcctagcgttataacaaaatcaggaaaaaagatattagtaaaagatgtagaccatttaatacgatccaaggttagagaacatacatttgtaaaagtaaaaaagaaaaacacattttccattttatacgactatgatggaaacggaacagaaactagaggagaagtaataaaacgaattatagacactataggacgagactattatgttaacggaaagtatttctctaaggttggtagtgcaggcttaaagcaattgactaataaattagatattaatgagtgcgcaactgtcgatgagttagttgatgagattaataaatccggaactgtaaaacgaaaaataaaaaaccaatcagcatttgatttaagcagagaatgtttgggatatccagaagcggattttataacgttagttaataacatgcggttcaaaatagaaaattgtaaggttgtaaatttcaatattgaaaatactaattgtttaaataacccgagtattgaaactatatatggaaactttaaccagttcgtctcaatctttaatgtcgtcaccgatgtcaaaaaaagattattcgagtgaaataatatgcgcctttgatataggtgcaaaaaatcctgccagaactgttttagaagtcaaggataactccgttagggtattggatatatcaaaattagactggagttctgattgggaaaggcgcatagctaaagatttgtcacaatatgaatacactacagttcttctagaacgtcagcctagaaggtcgccgtatgttaaatttatctattttattaaaggctttttatatcatacatcggctgccaaagttatttgcgtctcgcctgtcatgtctggtaattcatatagagatcgaaaaaagagatcggtcgaagcatttcttgattggatggacacattcggattgcgagactccgttccggatagacgcaaattagacgatgtagcggatagtttcaatttggctatgagatacgtattagataaatggaatactaattatacaccttataataggtgtaaatctagaaattacataaaaaaaatgtaataacgttagtaacgccattatggataatctatttacctttctacatgaaatagaagatagatatgccagaactatttttaactttcatctaataagttgcgatgaaataggagatatatatggtcttatgaaagaacgcatttcctcagaggatatgtttgataatatagtgtataataaagatatacatcctgccattaagaaactagtgtattgcgacatccaacttactaaacacattattaatcagaatacgtatccggtatttaacgattcttcacaagtgaaatgttgtcattatttcgacataaactcagataatagcaatattagctctcgtacagtagagatatttgagagggaaaagtcatctcttgtatcatatattaaaactaccaataagaagagaaaggtcaattacggcgaaataaagaaaactgttcatggaggcactaatgcaaattacttttccggtaaaaagtctgacgagtatctgagtactacagttagatccaacattaatcaaccttggatcaaaaccatctctaagaggatgagagttgatatcattaatcactctatagtaacgcgtggaaaaagctctatattacaaactatagaaattatttttactaatagaacatgtgtgaaaatattcaaggattctactatgcacattattctatccaaggacaaggatgaaaaggggtgtatacacatgattgacaaattattctatgtctattataatttatttctgttgttcgaagatatcatccaaaacgagtactttaaagaagtagctaatgttgtaaaccacgtactcacggctacggcattagatgagaaattattcctaattaagaaaatggctgaacacgatgtttatggagttagcaatttcaaaatagggatgtttaacctgacatttattaagtcgttggatcataccgttttcccctctctgttagatgaggatagcaaaataaagttttttaaggggaaaaagctcaatattgtagcattacgatctctggaggattgtataaattacgtgactaaatccgagaatatgatagaaatgatgaaggaaagatcgactattttaaatagcatagatatagaaacggaatcggtagatcgtctaaaagaattgcttctaaaatgaaaaaaaacactaattcagaaatggatcaacgactagggtataagtttttggtgcctgatcctaaagccggagttttttatagaccgttacatttccaatatgtatcgtattctaattttatattgcatcgattgcatgaaatcttgaccgtcaagcggccactcttatcgtttaagaataatacagaacgaattatgatagaaattagcaatgttaaagtgactcctccagattactcacctataatcgcgagtattaaaggtaagagttatgacgcattagccacgttcactgtaaatatctttaaagaggtaatgaccaaagagggtatatccatcactaaaataagtagttatgagggaaaagattctcatttgataaaaattccgctactaataggatacgggaataaaaatccacttgatacagccaagtatcttgttcctaatgtcataggtggagtctttatcaataaacaatctgtcgaaaaagtaggaattaatctagtagaaaagattacaacatggccaaaatttagggttgttaagccaaactcattcactttctcgttttcctccgtatcccctcctaatgtattaccgacaagatatcgccattacaagatatctctggatatatcacaattggaagcgttgaatatatcatcgacaaagacatttataacggtcaatattgttttgctgtctcaatatttatctagagtgagtctagaattcattagacgtagtttatcatacgatatgcctccagaagttgtctatctagtaaacgcgataatagatagtgctaaacgaattactgaatctattactgactttaatattgatacatacattaatgacctggtggaagctgaacacattaaacaaaaatctcagttaacgatcaacgagttcaaatatgaaatgctgcataactttttacctcatatgaactatacacccgatcaactaaagggattttatatgatatctttactaagaaagtttctctactgtatcttccacacttctagatatccagatagagattcgatggtttgtcatcgcatcctaacgtacggcaaatattttgagacgttggcacatgatgaattagagaattacataggcaacatccgaaacgatatcatgaacaatcacaagaacagaggcacttacgcggtaaacattcatgtactaacaactcccggacttaatcacgcgttttctagcttattgagtggaaagttcaaaaagtcagacggtagttatcgaacacatcctcactattcatggatgcagaatatttctattcctaggagtgttggattttatccggatcaagtaaagatttcaaagatgttttctgtcagaaaataccatccaagtcaatatctttacttttgttcatcagacgttccggaaagaggtcctcaggtaggtttagtatctcaattgtctgtcttgagttccattacaaatatactaacgtctgagtatttggatttggaaaagaaaatttgtgagtatatcagatcatattataaagatgatataagttactttgaaacaggatttccaatcactatagaaaatgctctagtcgcatctcttaatccaaatatgatatgtgattttgtaactgactttagacgtagaaaacggatgggattcttcggtaacttggaggtaggtattactttagttagggatcacatgaatgaaattcgcattaatattggagcgggaagattagtcagaccattcttggttgtggataacggagagctcatgatggatgtgtgtccggagttagaaagcagattagacgacatgacattctctgacattcagaaagagtttccgcatgtcatcgaaatggtagatatagaacaatttacttttagtaacgtatgtgaatcggttcaaaaatttagaatgatgtcaaaggatgaaagaaagcaatacgatttatgtgactttcctgccgaatttagagatggatatgtagcatcttcattagtgggaatcaatcacaattctggacccagagctattcttggatgtgctcaagctaaacaagctatctcttgtctgagctcggatatacgaaataaaatagacaatggaattcatttgatgtatccagagaggccaatcgtgattagtaaggctttagaaacttcaaagattgcggctaattgcttcggccaacatgttactatagcattaatgtcgtacaaaggtatcaatcaagaggatggaattatcatcaaaaaacaatttattcagagaggcggtctcgatattgttacagccaagaaacatcaagtagaaattccattggaaaactttaataacaaagaaagagataggtctaacgcctattcaaaattagaaagtaatggattagttagactgaatgctttcttggaatccggagacgctatggcacgaaatatctcatcaagaactcttgaagatgattttgctagagataatcagattagcttcgatgtttccgagaaatataccgatatgtacaaatctcgcgttgaacgagtacaagtagaacttactgacaaagttaaggtacgagtattaaccatgaaagaaagaagacccattctaggagacaaatttaccactagaacgagtcaaaagggaacagtcgcgtatgtcgcggatgaaacggaacttccatacgacgaaaatggtatcacaccagatgtcattattaattctacatccatcttctctagaaaaactatatctatgttgatagaagttattttaacagccgcatattctgctaagccgtacaacaataagggagaaaaccgacctgtctgttttcctagtagtaacgaaacatccatcgatacatatatgcaattcgctaaacaatgttatgagcattcaaatccgaaattgtccgatgaagaattatcggataaaatcttttgtgaaaagattctctatgatcctgaaacggataagccttatgcatccaaagtattttttggaccaatttattacttgcgtctgaggcatttaactcaggacaaggcaaccgttagatgtagaggtaaaaagacgaagctcattagacaggcgaatgagggacgaaaacgtggaggaggtatcaagttcggagaaatggagagagactgtttaatagcgcatggtgcagccaatactattacagaagttttgaaagattcggaagaagattatcaagatgtgtatgtttgtgaaaattgtggagacatagcagcacaaatcaagggtattaatacatgtcttagatgttcaaaacttaatctctctcctctcttaacaaaaattgataccacgcacgtatctaaagtatttcttactcaaatgaacgccagaggcgtaaaagtcaaattagatttcgaacgaaggcctccttcgttttataaaccattagataaagttgatctcaagccgtcttttctggtgtaatattctagtttggtagtagatacatatcaatatcatcaaattcgagatccgaattataaaatgggcgtggattgttaactatagaatcggacgtctgatattcgaaaatctgtggagtttcaggttttggtggaggtgtaactgctacttgggatactgaagtctgatattcagaaagctgtggatgttctggttcggcatccaccgatggtgtcacatcactaatcggttcggtaacgtctgtggatggaggtgctacttctacagaacctgtagcctcagttgtcaacggagatacatttttaatgcgagaaaatgtataatttggtaatggtttcttatgtggatctgaagaagaggtaagatatctactagaaagataccgatcacgttctagttctcttttgtagaacttaactttttctttctccgcatctagttgatattccaacctcttcacgttactacgttcagattccaattcacgttcgcatgggttacctccgcagtttttacgagcgatttcacgttcagccttcatgcgtctctccctctctctatcgagtttatcagagcagtctttctgaaggcgatcgaactccataaatttctccaacgctttgattgtttccatagatttccgaagttcagcttttaggactgtgattctttttctttcgaattcacagctggatgtacaaccgtttccattaccgccatctctaagtttcttttctagatcggcaacatttcatccccatgccttttacattcctcgagtctactgtcgtcgaaatatcgttccagctccttttcgacatcaataactttagcacgttgtctctcaagctctcttttgtagttatctgattccctggcacgtttaagatcttcatgcaattgagtcagctcttaacttcctctcttgcttcttcgtcatagtacgcgcaatcactgtgagatccattgttaccacgtctacactcggcgagctcgcgtttaagagattcaatttcccgtttgtattggtccatgtttccattgctaccaccattagatttacaggctgctagttgtcgttcgagatcagaaatacgggttttcttggaattgatttcgtcgatgtacttggcatcgaaacacttattaagttctttttccaattctacgattttatttctttcgcgagtcaattccctcctgtagtaactatctgttttgtcagattcacgctctctacgtagactttcttgcaagttactaatttgttccctagcacgtccgagtttagttttatatgctgaatagagttctgattcatcctttgagcagatctctagcgatcgtttaagattcctaattctagtctttagcctatttacctcctcagaagatgttccgttaccgttgcgtttacactcgttaagctgtctatcaagatccatgattctatctctaagacgttgcatctctctttccatatcagcattgctttcattattacgtctgcagtcactcaactgtctttcaatatctgagattctatctctaagacgtcgcatctctctctgtttcggcattggtttcattattacgtttacagtcgttcaactgtctttcaagatctgatattctagattggagtctgctaatctctgtagcattttcacggcattcactcagttgtctttcaagatctgaaattttagattggagtctgctaatctctgtaagatttcctcctccgctctcgatgcagtcggtcaacttattctctagttctctaatacgcgaacgcagtgcatcaacttcttgcgtgtcttcctggttgcgtgtacattcatcgagatctctaacgcgtcgtcgttcttcctcaagttctctgcgtactacagaaagcgtgtccctatcttgttgatatttagcaatttctgattctagagtactgattttgcttacgtagttactaatagttgtcttggccttatcaagatcctccttgtatttgtcgcattccttgatatccctacgaagtctggacagttcccattcgacattacgacgtttatcgatttcagctcggagatcgtcatcgcgttgttttagccacatacgactgagttcaagttctcgttgacaagatccatctacttttccattcctaatagtatccagttccttttctagttctgaacgcatttctcgttccctatcaagcgattctctcaattctcggatagtcttcttatcaatttctaataaatctgaaccatcatctgtcccattttgaatatccctgtgttctttgatctcttttgtaagtcggtcgattctttcggttttataaacagaatccctttccaaagtcctaatcttactgagtttatcactaagttctgcattcaattcggtgagttttctcttggcttcttccaactctgttttaaactctccactatttccgcattcttcctcgcatttatctaaccattcaattagtttattaataactagttggtaatcagcgattcctatagccgttcttgtaattgtgggaacataattaggatcttctaatggattgtatggcttgatagcatcatctttatcattattagggggatggacaaccttaattggttggtcctcatctcctccagtagcgtgtggttcttcaataccagtgttagtaataggcttaggcaaatgcttgtcgtacgcgggcacttcctcatccatcaagtatttataatcgggttctacttcagaatattcttttctaagagacgcgacttcgggagttagtagaagaactctgtttctgtatctatcaacgctggaatcaatactcaagttaaggatagcgaatacctcatcgtcatcatccgtatcttctgaaacaccatcatatgacatttcatgaagtctaacgtattgataaatagaatcagatttagtattaaacagatccttaacctttttagtaaacgcatatgtatattttagatctccagatttcataatatgatcacatgccttaaatgtcagtgcttccatgatataatctggaacactaatgggtgacgaaaaagatacagcaccatatgctacgttgataaataaatctgaaccactaagtagataatgattaatgttaagaaagaggaaatattcagtgtataggtatgtcttggcgtcatatcttgtactaaacacgctaaacagtttgttaatgtgatcaatttccaatagattaattagagcagcgggaataccaacaaacatattaccacatccgtattttctatgaatatcacatatcatgttaaaaaatcttgatagaagagcgaatatctcgtctgacttaatgagtcgtagttcagcagcaacataagtcataactgtaaatagaacatactttcctgtagtgttgattctagactccacatcaacaccattattaaaaatagttttatatacatctttaatctgctctccgttaatcgtcgaacgttctagtatacggaaacactttgatttcttatctgtagttaatgacttagtgatatcacgaagaatattacgaattacatttcttgtttttcttgagagacctgattcagaactcaactcatcgttccatagtttttctacctcagtggcgaaatctttggagtgcttggtacatttttcaataaggttcgtgacctccatttattataaaaaatttattcaaaacttaactacaatcgggtaattataagatcgtagatctcccatgtggcggaatactaccatctatcgcatgtggatggacagtaggtaatggccatgggaacagtaatgtttgcatatttatctttcttgctagtattactgcatattgtcccaatgtttcgatgtgatgttctaacctatcaactgccgctgtatcacaacaatagtgtccgatgaaattaagattatgatccaatgtgtttaatatatgattatcaagtcttatacgatccgcgtcttttttgacaggatcaggttcttctacaggaagaagtttcggcctcttatgatattcatgtctgggaaacggtggtctagggtgaggctccggtatcggagtgggttttggattataatcatcatcgtctatgacatcatcttcgacttcgatatttattttgctatcttgatgatgtcctgtatcagttgcattttcagcactcgactgaatattagcgcattcattgtctattattaccatatttctaaacccaaaatgtatgtgttgaacatcagtactatcgttgatgagtcttatagcatgaattcgcttatcgttatcgggtttatcttctgtcaccttagcaattccttttttattaaactctacataatcatatccatttctattgtttgttctaatataaacgagtatagcatcattgctaaatttttcaatagtatcaaaaacagaatatcctaaaccatataatatatattcaggaacactcaaactaaatgtccaggattctcctaaatacgtaaactttaatagtgcgaaatcattcaaaaatctaccacttatagatagatagtacataaatgcgtatagtagtctacctatctctttattatgaaaaccggcattacgatcatatatgtcgtgatatacctgtgatccgtttacgttaaaccataaatacatgggtgatcctataaacatgaatttatttctaattctcagagctatagttaattgaccgtgtaatatttgcttacatgcatacttgatacgcttattaataagatttttatcattgctcgttatttcagaatcgtatatataaggagtaccatcgtgattcttaccagatattatacaaaatactatatataaaatatattgacccacgttagtaatcatataaatgtttaacgttttaaattttgtattcaatgatccattatcatacgctatcatggtcttgtaatattcattctttaaaatataatattgtgttagccattgcattggagctcctaatggagattttctattctcatccattttaggataggctttcataaagtccctaataacttcgtgaataatgtttctatgttttctactgatgcatgtatttgcttcgatttttttatcccatgtttcatctatcatagatttaaacgcagtaatgctcgcaacattaacatcttgaaccgttggtacaattccgttccataaatttataatgttcgccatttatataactcattttttgaatatacttttaattaacaaaagagttaagttactcatatggacgccgtccagtctgaacatcaatctttttagccagagatatcatagccgctcttagagtttcagcgtgattttccaacctaaatagaacttcatcgttgcgtttacaacacttttctatttgttcaaactttgttgttacattagtaatctttttttccaaattagttagccgttgtttgagagtttcctcattgtcgtcttcatcggctttaacaattgcttcgcgtttagcctctggctttttagcagcctttgtagaaaaaaattcagttgctggaattgcaagatcgtcatctccggggaaaagagttccgtccatttaaagtacagattttagaaactgacactctgcgttatttatatttggtacaacacatggattataaatattgatgttaataacatcagaaaatgtaaagtctatacattgttgcatcgtgttaaattttctaatggatctagtattattgggtccaacttctgcctgaaatccaaatatggaagcggatacaaaaccgtttcctggataaaccacacatctccacttttgctttacatcagaaattgtgtcgttgacatcttgaactctcctatctaatgccggtgttccacctatagattttgaatattcgaatgctgcatgagtagcattaaattccttaatattgccataattttcatatattgagtaaccctggataaaaagtaaacacaccgcagccgtcgctaccacaataaaaaaaattgatagagagttcatttataatctattagaagctgacaaaatttttttacacgcatcagacaatgctttaataaatagttcaacatctacttttgtcatatcgaaccgatggtatgattctaacctagaattacatccgaaaaagttgactatgttcatagtcattaagtcattaacaaacaacattccagactctggattataagacgatactgtttcgtcacaattacctaccttaatcatgtgattatgaatattggctattagagcaccttctaagaaatctataatatctttgaaacacgatttaaaatcaaaccacgaatatacttctacgaagaaagttagtttacccataggagaaataactataaatggagatctaaatacaaaatccggatctatgatagttttaacattattatattctctattaaatacctccacatctaaaaatgttaattttgaaactatgtcttcgtttattaccgtacctgaactaaacgctataagctctattgtttgagaactctttaaacgatattcttgaaatacatgtaacaaagtttcctttaactcggtcggtttatctaccatagttacagaatttgtatccttatctataatataataatcaaaatcgtataaagttatataattatcgcgttcagattgtgatcttttcaaatagactaaaaaccccatttctctagtaagtatcttatgtatatgtttgtaaaatatcttcatggtgggaatatgctctaccgcagttagccattcctcattgacagcggtagatgtattagacaaaactattccaatgtttaacaagggccattttacgagattattaaatccttgtttgataaatgtagccaatgagggttcgagttcaacgacgattgaattctcttcccgcggatgctgcatgatgaacgacgggatgttgttcgattgatttggaattctttttcgactttttgtttatattaaatattttaaaatttatagcggatagcaattcatgtaccacggataatgtagacgcgtattgcgcatcgatatctttattattagataaatttatcaataaatgtgagaagtttgcctcgttaaggtcttccatttaaatattatataaacatttgtgtttgtatcttattcgtcttttatggaatagttttttactagtaaagctgcaattacacactttgtccgtaaaacataaatataaacaccagcttttatcaatcgttccaaaaagtcgacggcggacatttttaacatggcatctattttaaatacacttaggtttttggaaaaaacatcattttataattgtaacgattcaataactaaagaaaagattaagattaaacataagggaatgtcatttgtattttataagccaaagcattctaccgttgttaaatacttgtctggaggaggtatatatcatgatgatttggttgtattggggaaggtaacaattaataatctaaagatgatgctattttacatggatttatcatatcatggagtgacaagtagtggagcaatttacaaattgggatcgtctatcgatagactttctctaaataggactattgttacaaaagttaataattatgatgatacattttttgacgacgatgattgatcgctattgcacaattttgtttttgtactttctaatatagtgtttaggttctttttcatatgagaatattgatttactaaaatatctatgtttaacttttgttctatgacgtccttatcggcggtatcggtacatatacgtaattcaccttcacaaaatacggagtcttcgataataatagccaatcgattattggatctagctgtctgtatcatattcaacatgtttaatatatcctttcgtttcccctttacaggcatcgatcgtagcatattttccgcgtctgatatggaaatgttaaaactacaaaaatgcgtaatgttagcccgtcctaatattggtacgtgtctataagtttggcatagtagaataatagacgtgtttaaatgccttccaaagtttaagaattctattagagtattgcattttgatagtttatcgcctacatcatcaaaaataagtaaaaagtgtgctgattttttatgattttgtgcgacagcaatacatttttctatgttacttttagttcgtatcagattatattctagagattcctgactactaacgaaattaatatgatttggccaaatgtatccatcataatctgggttataaacgggtgtaaacaagaatatatgtttatattttttaactagtgtagaaaacagagatagtaaatagatagtttttccagatccagatcctcctgttaaaaccattctaaacggcatttttaataaattttctcttgaaaattgtttttcttggaaacaattcataattatatttacagttactaaattaatttgataataaatcaaaatatggaaaactaaggttgttagtagggaggagaacaaagaaggcacatcgtgatataaataacatttattatcatgatgacaccagaaaacgacgaagagcagacatctgtgttctccgctactgtttacggagacaaaattcagggaaagaataaacgcaaacgcgtgattggtctatgtattagaatatctatggttatttcactactatctatgattaccatgtccgcgtttctcatagtgcgcctaaatcaatgcatgtctgctaacgaggctgctattactgacgccgctgttgccgttgctgctgcatcatctactcatagaaaggttgcgtctagcactacacaatatgatcacaaagaaagctgtaatggtttatattaccagggttcttgttatatattacattcagactaccagttattctcggatgctaaagcaaattgcactgcggaatcatcaacactacccaataaatccgatgtcttgactacctggctcattgattatgttgaggatacatggggatctgatggtaatccaattacaaaaactacatccgattatcaagattctgatgtatcacaagaagttagaaagtatttttgtgttaaaacaatgaactaatatttatttttgtacattaataaatgaaatcgcttaatagacaaactgtaagtaggtttaagaagttgtcggtgccggccgctataatgatgatactctcaaccattattagtggcataggaacatttctgcattacaaagaagaactgatgcctagtgcttgcgccaatggatggatacaatacgataaacattgttatttagatactaacattaaaatgtctacagataatgcggtttatcagtgtcgtaaattacgagctagattgcctagacctgatactagacatctgagagtattgtttagtattttttataaagattattgggtaagtttaaaaaagaccaatgataaatggttagatattaataatgataaagatatagatattagtaaattaacaaattttaaacaactaaacagtacgacggatgctgaagcgtgttatatatacaagtctggaaaactggttaaaacagtatgtaaaagtactcaatctgtactatgtgttaaaaaattctacaagtgacaacaaaaaatgaattaataataagtcgttaacgtacgccgccatggacgccgcgtttgttattactccaatgggtgtgttgactataacagatacattgtatgatgatctcgatatctcaatcatggactttataggaccatacattataggtaacataaaaactgtccaaatagatgtacgggatataaaatattccgacatgcaaaaatgctactttagctataagggtaaaatagttcctcaggattctaatgatttggctagattcaacatttatagcatttgtgccgcatacagatcaaaaaataccatcatcatagcatgcgactatgatatcatgttagatatagaagataaacatcagccattttatctattcccatctattgatgtttttaacgctacaatcatagaagcgtataacctgtatacagctggagattatcatctaatcatcaatccttcagataatctgaaaatgaaattgtcgtttaattcttcattctgcatatcagacggcaatggatggatcataattgatgggaaatgcaatagtaattttttatcataaaagttgtaaagtaaataataaaacaataaatattgaactagtagtacgtatattgagcaatcagaaatgatgctggtacctcttatcacggtgaccgtagttgcgggaacaatattagtatgttatatattatatatttgtaggaaaaagatacgtactgtctataatgacaataaaattatcatgacaaaattaaaaaagataaagagttctaattccagcaaatctagtaaatcaactgatagcgaatcagactgggaggatcactgtagtgctatggaacaaaacaatgacgtagataatatttctaggaatgagatattggacgatgatagcttcgctggtagtttaatatgggataacgaatccaatgttatggcgcctagcacagaacacatttacgatagtgttgctggaagcacgctgctaataaataatgatcgtaatgaacagactatttatcagaacactacagtagtaattaatgaaacggagactgttgaagtacttaatgaagataccaaacagaatcctaactattcatccaatcctttcgtaaattataataaaaccagtatttgtagcaagtcaaatccgtttattacagaacttaacaataaatttagtgagaataatccgtttagacgagcacatagcgatgattatcttaataagcaagaacaagatcatgaacacgatgatatagaatcatcggtcgtatcattggtgtgattagtttcctttttataaaattgaagtaatatttagtattattgctgccgtcacgttgtacaaatggagatattccctgtattcggcatttctaaaattagcaattttattgctaataatgactgtagatattatatagatacagaacatcaaaaaattatatctgatgagatcaatagacagatggatgaaacggtacttcttaccaacatcttaagcgtagaagttgtaaatgacaatgagatgtaccatcttattcctcatagattatcgacgattatactctgtattagttctgtcggaggatgtgttatctctatagataatgacatcaatggcaaaaatattctaacctttcccattgatcatgctgtaatcatatccccactgagtaaatgtgtcgtagttagcaagggtcctacaaccatattggttgttaaagcggatatacctagcaaacgattggtaacatcgtttacaaacgacatactatatgtaaacaatctgtcactgattaattatttgccgttgtctgtattcattattagacgagtcaccgactatttggatagacacatatgcgatcagatatttgctaataataagtggtattcccttataaccatcgacgataagcaatatcctattccatcaaactgtataggtatgtcctctgccaagtacataaattctagcatcgagcaagatactttaatccatgtttgtaacctcgagcatccgttcgactcagtatacaaaaaaatgcagtcgtacaattctctacctatcaaggaacaaatattgtacggtagaattgataatataaatatgagcattagtatttctgtggattaatagatttctagtatggggatcattaatcatctctaatctctaaatacctcataaaacgaaaaaaaagctattatcaaatactgtacggaatggattcattctcttctctttttatgaaactctgttgtatatctactgataaaactggaagcaaaaaatctgatagaaagaataagaataagatcaaggattatatggaacacgattattataaaataacaatagttcctggttcctcttccacgtctactagctcgtggtattatacacatgcctagtaatagtctctttgcgttgacggaaagcagactagaaataacaggctaaaatgttcagacaccataatagttcccaacccagataataacagagttccatcaacacattcctttaaactcaatcccaaacccaaaaccgttaaaatgtatccggccaattgatagtagataatgaggtgtacagcgcatgataatttacacagtaaccaaaatgaaaatactttagtaattataagaaatatagacggtaatgtcatcatcaacaatccgataatatgcctgagagtaaacattgacggataaaacaaaaatgctccgcataactctatcatggcaataacacaaccaaatacttgtaagattcctaaattagtagaaaatacaacgaatatcgatgtataagtgatctcgagaaataataagaataaagtaatgcccgtaaagataaacatcaacattgtttggtaatcattaaaccaattagtatgaagttgaactaatttcacagtagattttattccagtgttatcctcgcatgtataagtacctggtaagatatctttatattccataatcaatgagacatcactatctgataacgaatgaagtctagcactagtatgccatttacttaatattgtcgtcttggaagttttattataagttaaaatatcatggttatccaatttccatctaatatactttgtcggattatctatagtacacggaataatgatggtatcattacatgctgtatactctatggtctttgtagttgttataacaaccaacgtatagaggtatatcaacgatattctaactcttgacattttttatttatttaaaatgatacctttgttatttattttattctattttgctaacggtattgaatggcataagtttgaaacgagtgaagaaataatttctacttacttattagacgacgtattatacacgggtgttaatggggcggtatacacattttcaaataataaactaaacaaaactggtttaactaataataattatataacaacatctataaaagtagaggatgcggataaggatacattagtatgcggaaccaataacggaaatcccaaatgttggaaaatagacggttcagacgacccaaaacatagaggtagaggatacgctccttatcaaaatagcaaagtaacgataatcagtcacaacggatgtgtactatctgacataaacatatcaaaagaaggaattaaacgatggagaagatttgacggaccatgtggttatgatttattcacggcggataacgtaattccaaaagatggtttacgaggagcattcgtcgataaagacggtacttatgacaaagtttacattcttttcactgatactatcggctcaaagagaattgtcaaaattccgtatatagcacaaatgtgcctaaacgacgaaggtggtccatcatcattgtctagtcatagatggtcgacgtttctcaaagtcgaattagaatgtgatatcgacggaagaagttatagacaaattattcattctagaactataaaaacagataatgatacgatactatatgtattcttcgatagtccttattccaagtccgcattatgtacctattctatgaataccattaaacaatctttttctacgtcaaaattggaaggatatacaaagcaattgccgtctccagctcctggtatatgtttaccagctggaaaagttgttccacataccacgtttgaagtcatagaacaatataatgtactagatgatattataaagcctttatctaaccaacctatcttcgaaggaccgtctggtgttaaatggttcgatataaaggagaaggaaaatgaacatcgggaatatagaatatacttcataaaagaaaattctatatattcgttcgatacaaaatctaaacaaactcgtagctcgcaagtcgatgcgcgactattttcagtaatggtaactgcgaaaccgttatttatagcagatatagggataggagtaggaatgccacaaatgaaaaaaatacttaaaatgtaatcttaatcgagtacaccacacgacaatgaacaaacataagacagattatgctggttatgcttgctgcgtaatatgcggtctaattgtcggaattatttttacagcgacactattaaaagttgtagaacgtaaattagttcatacaccattaatagataaaacgataaaagatgcatatattagagaagattgtcctactgactggataagctataataataaatgtatccatttatctactgatcgaaaaacctgggaggaaggacgtaatgcatgcaaagctctaaattcaaattcggatctaattaagatagagactccaaacgagttaagttttttaagaagccttagacgaggctattgggtaggagaatccgaaatattaaaccagacaaccccatataattttatagctaagaatgccacgaagaatggaactaaaaaacggaaatatatttgtagcacaacgaatactcccaaactgcattcgtgttacactatataacaattacactacatttttatcataccactacttcggttagatgttttagaaaaaaataaatatcgccgtaccgttcttgtttttataaaaataacaattaacaattatcaaattttttctttaatattttacgtggttgaccattcttggtggtaaaataatctcttagtgttggaatggaatgctgtttaatgtttccacactcatcgtatattttgacgtatgtagtcacatcgtttacgcaatagtcagactgtagttctatcatgcttcctacatcagaaggaggaacagttttaaagtctcttggttttaatctattaccgttagttttcatgaaatcctttgttttatccacttcacattttaaataaatgtccactatacattcttttgttaattttactagatcgtcatgggtcatagaatttataggttccgtagtccatggatccaaactagcaaacttcgcgtatacggtatcgcgattagtgtatacaccaactgtatgaaaattaagaaaacagtttaataaatcaacagaaatatttaatcctccgtttgatacagatgcgccatatttatggatttcggattcacacgttgtttgtctgaggtgttcgtctagtgttgcttctacgtaaacttcgattcccatatattctttattgtcagaatcgcataccgatttatcatcatacactgtttgaaaactaaatggtatacacatcaaaataataaataataacgagtacattctgcaatattgttatcgtaattggaaaaatagtgttcgagtgagttggattatgtgagtattggattgtatattttattttatattttgtaataagaataaaatgctaatgtcaagtttattccaatagatgtcttattaaaaacatatataataaataacaatggctgaatggcataaaattatcgaggatatctcaaaaaataataagttcgaggatgccgccatcgttgattacaagactacaaagaatgttctagctgctattcctaacagaacatttgccaagattaatccgggtgaaattattcctctcatcactaatcgtaatattctaaaacctcttattggtcagaaatattgtattgtatatactaactctctaatggatgagaacacgtatgctatggagttgcttactgggtacgcccctgtatctccgatcgttatagcgagaactcataccgcacttatatttttgatgggtaagccaacaacatccagacgtgacgtgtatagaacgtgtagagatcacgctacccgtgtacgtgcaactggtaattaaaataaaaagtaatattcatatgtagtgtcaattttaaatgatgatgatgaaatggataatatccatattgacgatgtcaataatgccggtattggcatacagttcatcgatttttagatttcattcagaggatgtggaattatgttatgggcatttgtattttgataggatctataatgtagtaaatataaaatataatccgcatattccatatagatataattttattaatcgcacgttaaccgtagatgaactagacgataatgtcttttttacacatggttattttttaaaacacaaatatggttcacttaatcctagtttgattgtctcattatcaggaaacttaaaatataatgatatacaatgctcagtaaatgtatcgtgtctcattaaaaatttggcaacgagtacatctactatattaacatctaaacataagacttattctctacatcggtccacgtgtattactataataggatacgattctattatatggtataaagatataaatgacaagtataatgacatctatgattttactgcaatatgtatgctaatagcgtctacattgatagtgaccatatacgtgtttaaaaaaataaaaatgaactcttaattatgctatgctattagaaatggataaaatcaaaattacggttgattcaaaaattggtaatgttgttaccatatcgtataacttggaaaagataactattgatgtcacacctaaaaagaaaaaagaaaaggatgtattattagcgcaatcagttgctgtcgaagaggcaaaagatgtcaaggtagaagaaaaaaatattatcgatattgaagatgacgatgatatggatgtagaaagcgcgtaatacgatctataaaaataagtatataaatactttttatttactgtactcttactgtgtagtggtgataccctactcgattatttttttaaaaaaaaaatacttattctgattcttctagccatttccgtgttcgtttgaatgccacatcgacgtcaaagataggggagtagttgaaatctagttctgcattgttggtacgcacctcaaatgtagtgttggatatcttcaacgtatagttgttgagtagtgatggttttctaaatagaattctcttcatatcattcttgcacgcgtacatttttagcatccatcttggaatcctagatccttgttctattcccaatggtttcatcaatagaagattaaacatatcgtacgaacacgatggagagtaatcgtagcaaaagtaagcatttcctttaatcttagatcccggatactggatatattttgcagccaacacgtgcatccatgcagcatttcctacatatacccggctatgcaccgcgtcatcatcgactgtacgatacataatgttaccgtgttgcttacattgctcgtaaaagactttcatcaatttgtctccttctccgtaaattccagtgggtcttaggcaacaagtatacaattttgctccattcatgattacggaattattggctttcataaccagttgctcggccatacgtttactttttgcgtatacatgtcctggtgatatatcataaagggtatgctcatggccgatgaatggatcaccgtgtttattgggtcctattgcttccatgctactagtatagatcaaatacttgattcctaggtccacacaagctgccaaaatagtctgtgttccataatagtttactttcatgatttcattatcggtgtattttccaaatacatccactagagcagccgtatgaataatcagatttaccccatctagcgcttctctcaccttatcaaagtcgtttatatcacattgtatatagtttataaccttaactttcgaggttattggttgtggatcttctacaatatctatgactctgatttcttgaacatcatctgcactaattaacagttttactatatacctgcctagaaatccggcaccaccagtaaccgcgtacacggccattgctgccactcataatatcagactacttattctattttactaaataatggctgtttgtataatagaccacgataatatcagaggagttatttactttgaaccagtccatggaaaagataaagttttaggatcagttattggattaaaatccggaacgtatagtttgataattcatcgttacggagatattagtcaaggatgtgattccataggcagtccagaaatatttatcggtaacatctttgtaaacagatatggtgtagcatatgtttatttagatacagatgtaaatatatttacaattattggaaaggcgttatctatttcaaaaaatgatcagagattagcgtgtggagttattggtatttcttacataaatgaaaagataatacattttcttacaattaacgagaatggcgtttgatatatcagttaatgcgtctaaaacaataaatgcattagtttacttttctactcagcaaaataaattagtcatacgtaatgaagttaatgatacacactacactgtcgaatttgatagggacaaagtagttgacacgtttatttcatataatagacataatgacaccatagagataagaggggtgcttccagaggaaactaatattggttgcgcggttagtatgacttacttgtataataagtatagttttaaactgattttagcagaatatataagacacagaaatactatatccggcaatatttattcggcattgatgacactagatgatttggctattaaacagtatggagacattgatctattatttaatgagaaacttaaagtagactccgattcgggactatttgactttgtcaactttgtaaaggatatgatatgttgtgattctagaatagtagtagctctatctagtctagtatctaaacattgggaattgacaaataaaaaatataggtgtatggcattagccgaacatatatctgatagtattccaatatctgagctatctagactacgatacaatctatgtaagtatctacgcggacacactgagagcatagaggataaatttgattattttgaagacgatgattcgtctacatgttctgccgtaaccgacagggaaacggatgtataattttttttatagcgtgaaggatatgataaaaaatataattgttgtatttatcccattccaatcaccttatatgattctgtaacacaataaaggagtcttatagatgtatagaggtcagatactggtttgataaactgtttattccacataagtatgtttgactttatggttagacccgcatactttaacaaatcactgaaaattggagttaggtattgacctctcagaatcagttgccgttctggaacattaaatgtattttttatgatatactccaacgcatttatgtgggcatacaacaagtcattactaatggaatattccaagagttttagttgtctagtatttaacaagagaagagatttcaacagactgtttatgaactcgaatgccgcctcattgtcgcttatattgatgatgtcgaattctcccaatatcatcaccgatgagtagctcatcttgttatcgggatccaagttttctaaagatgtcattaaaccctcgatcatgaatggatttatcatcatcgtttttatgttggacatgagcttagtccgtttgtccacatctatagaagatgatttctgaattatttcatatatctctctctttaactccaggaacttgtcaggatggtctactttaatatgttctcgtctaagagatgaaaatctttggatggttgcacgcgacttttctctaaaggatgacgttgcccaagatcctctcttaaatgaatccatcttatccttggacaagatggacagtctattttccttagatggtttaatatttttgttacccatgatctataaaggtagacctaatcgtctcggatgaccatatatttattttcagttttattatacgcataaattgtaaaaaatatgttaggtttacgaaaatgtctcgtggggcattaatcgtttttgaaggattggacaaatctggaaaaacaacacaatgtatgaacatcatggaatcaataccttcaaacacaataaaataccttaactttcctcagagatccactgtcactggaaagatgatagatgactatctaactcgtaaaaaaacctataatgatcatatagttaatctattattttgtgcaaatagatgggagtttgcatcttttatacaagaacaactagaacagggaattactttaatagttgatagatacgcattttctggagtagcgtatgccgccgctaaaggcgcgtcaatgactctcagtaagagttatgaatctggattgcctaaacccgacttagttatattcttggaatctggtagcaaagaaattaatagaaacgtcggtgaggaaatttatgaagatgttacattccaacaaaaggtattacaagaatataaaaaaatgattgaagaaggagatattcattggcaaattatttcttctgaattcgaggaagatgtaaagaaggagttgattaagaatatagttatagaggctatacacacggttactggaccagtggggcaactgtggatgtaatagtgaaattacattttttataaatagatgttagtacagtgttataaatggatgaagcatattactctggcaacttggaatcagtactcggatacgtgtccgatatgcataccgaactcgcatcaatatctcaattagttattgccaagatagaaactatagataatgatatattaaacaaggacattgtaaattttatcatgtgtagatcaaacttggataatccatttatctctttcctagatactgtatatactattatagatcaagagaactatcagactgagttgattaattcattagacgacaatgaaattatcgattgtatagttaataagtttatgagcttttataaggataacctagaaaatatagtagatgctatcattactctaaaatatataatgaataatccagattttaaaactacgtatgccgaagtactcggttccagaatagccgatatagatattaaacaagtgatacgtaagaatatactacaattgtctaataatatccgcgaacgatatttgtgaaaatattaaaaaaaaatactttttttattaaatgacgtcttttcgtgaatttagaaaattatgctgtgctatatatcacgcatcaggatataaagaaaaatctaaattaattagagactttataacagatagggatgataaatatttgatcattaagctattgcttcccggattagacgatagaatttataacatgaacgataaacaaattataaaattatatagtataatatttaaacaatctcaggaagatatgctacaagatttaggatacggatatataggagacactattaggactttcttcaaagagaacacagaaatccgtccacgagataaaagcattttaactttagaagaagtggatagttttttaactacgttatcatccgtaactaaagaatcgcatcaaataaaattattgactgatgtagcatctgtttgtacatgtaatgatttaaaatgtgtagtcatgcttattgataaagatctaaaaattaaagcgggtcctcggtacgtacttaacgctattagtcctaatgcctatgatgtgtttagaaaatctaataacttgaaagagataatagaaaattcatctaaacaaaatctagactctatatctatttctgttatgactccaattaatcccatgttagcggaatcgtgtgattctgtcaataaggcgtttaaaaaatttccatcaggaatgtttgcggaagtcaaatacgatggtgaaagagtacaagttcataaaaataataacgagtttgccttctttagtagaaacatgaaaccagtactctctcataaagtggattatctcaaagaatacataccgaaagcatttaaaaaagctacgtctatcgtattggattctgaaattgttcttgtagacgaacataatgtaccgctcccgtttggaagtttaggtatacacaaaaagaaagaatataaaaactctaacatgtgtttgttcgtgtttgactgtttgtactttgatggattcgatatgacggacattccattgtacgaacgaagatcttttctcaaagatgttatggttgaaatacccaatagaatagtattctcagagttgacgaatattagtaacgagtctcagttaactgacgtattggatgatgcactaacgagaaaattagaaggattggtcttaaaagatattaatggagtatacgaaccgggaaagagaagatggttaaaaataaagcgagactatttgaacgagggttccatggcagattctgccgatttagtagtactaggtgcctactatggtaaaggagcaaagggtggtatcatggcagtctttctaatgggttgttacgacgatgaatccggtaaatggaagacggttaccaagtgttcaggacacgatgataatacgttaagggagttgcaagaccaattaaagatgattaaaattaacaaggatcccaaaaaaattccagagtggttagtagttaataaaatctatattcccgattttgtagtagaggatccgaaacaatctcagatatgggaaatttcaggagcagagtttacatcttccaagtcccataccgcaaatggaatatccattagatttcctagatttactaggataagagaggataaaacgtggaaagaatctactcatctaaacgatttagtaaacttgactaaatcttaatagttacatacaaactgaaaattaaaataacactatttagttggtggtcgccatggatggtgttattgtatactgtctaaacgcgctagtaaaacatggcgaggaaataaatcatataaaaaatgatttcatgattaaaccatgttgtgaaagagtttgtgaaaaagtcaagaacgttcacattggcggacaatctaaaaacaatacagtgattgcagatttgccatatatggataatgcggtatccgatgtatgcaattcactgtataaaaagaatgtatcaagaatatccagatttgctaatttgataaagatagatgacgatgacaagactcctactggtgtatataattattttaaacctaaagatgccattcctgttatcatatctataggaaaggataaagatgtctgtgaactattaatctcatcagacatatcgtgtgcatgcgtggagttaaattcatatcacgtagccattcttcccatggatgtttccttttttaccaaaggaaatgcatcattgattattctcctgtttgatttctctatcgatgcggcacctctcttaagaagtgtaaccgataataatgttattatatctagacaccagcgtctacatgacgagcttccgagttccaattggttcaagttttacataagtataaagtccgactattgttctatattatatatggttgttgatggatctgtgatgcatgcgatagctgataatagaactcacgcaattattagcaaaaatatattagacaatactacgattaacgatgagtgtagatgctgttattttgaaccacagattaggattcttgatagagatgagatgctcaatggatcatcgtgtgatatgaacagacattgtattatgatgaatttacctgatgtaggcgaatttggatctagtatgttggggaaatatgaacctgacatgattaagattgctctttcggtggctggtaatttaataagaaatcgagactacattcccgggagacgaggatatagctactacgtttacggtatagcctctagataatttttttaagcacgaaataaaaaacataattttaaaccaatctatttcatactattttgtgtgatcaccatggacataaagatagatattagtatttctggtgataaatttacggtgactactaggagggaaaatgaagaaagaaaaaaatatctacctctccaaaaagaaaaaactactgatgttatcaaacctgattatcttgagtacgatgacttgttagatagagatgagatgtttactattctagaggaatattttatgtacagaggtctattaggcctcagaataaaatatggacgactctttaacgaaattaaaaaattcgacaatgatgcggaagaacaattcggtactatagaagaactcaagcagaaacttagattaaattctgaagagggagcagataactttatagattatataaaggtacaaaaacaggatatcgtcaaacttactgtatacgattgcatatctatgataggattgtgtgcatgcgtggtagatgtttggagaaatgagaaactgttttctagatggaaatattgtttacgagcgattaaactgtttattgatgatcacatgcttgataagataaaatctatactgcagaatagactagtatatgtggaaatgtcatagaaagttaaaagttaatgagagcaaaaatatataaggttgtattccatatttgttatttttttctgtaatagttagaaaaatacattcgatggtctatctatcagattattatgtgttataaggtactttttctcataataaactagagtatgagtaagatagtgtttttcaaaacatataaatctaaaattgatggatgagatatacagctattaatttcgaaaatatattttaatctgataactttaaacatggatttttaatggtggtttaacgttttaaaaaaagattttgttattgtagtatatgataatattaaaagatggatataaagaatttgctgactgcatgtactattttttacattactacattggctacggcagatatacctacttcgtcactgccacacgctccggtaaacggggcatgtgacgagggagaatatcttgataagaggcataatcaatgttgtaatcagtgtccacctggagaatttgccaaggttagatgtaatggtaacgataacacaaaatgtgaacgctgcccacctcatacatataccgcaatccccaattactctaatggatgtcatcaatgtagaaaatgcccaacaggatcatttgataaggtaaagtgtaccggaacacagaacagtaaatgttcgtgtcttcctggttggtattgcgctactgattcttcacagactgaagattgtcgagattgtataccaaaaaggagatgtccatgcggatactttggtggaatagatgaacaaggaaatcctatttgtaaatcgtgttgtgttggtgaatattgcgactacctacgtaattatagacttgatccatttcctccatgcaaactatctaaatgtaattaattatgattttgatgataatgttaccatacattatatcgctacttggttagtgtattattcagtatgaagacctattaataattacttatcttttgacgatcttgttataattataatataaaaatacttatggcatagtaactcataattgctgacgcgataaattcgtaataatctgttttgttcaaatttttataaggaatctacaggcataaaaataaaaatataatttataatatactcttacagcgcgccatcatgaataacagcagtgaattgattgctgttattaatggatttagaaatagtggacgattttgtgatattaatatagttattaatgatgaaaggataaacgctcacagactcatcctatctggagcctccgaatatttttccattctgttttccaataattttatcgattctaatgaatacgaagttaatctaagtcatttagattatcaaagtgttaacgatttgatcgattacatttatgggatacctttgagcctaactaacgataacgtgaaatatattctttcaaccgctgattttttacaaattggatctgctattacggagtgtgaaaattacatacttaaaaatctttgttctagaaactgtatcgatttctacatatacgctgataaatataataacaagaaaatagaatcagcgtcgtttaacacaatattacaaaatattttgagactcatcaacgatgaaaactttaaatacttaacagaggaatcaatgataaaaattttaagcgatgatatgttaaatataaaaaatgaggatttcgccccactaattctcattaaatggttagagagtactcaacaaccatgcaccgtcgagttacttaaatgcctcagaatatcattgctttccccacaagttataaaatcactttatagtcatcgactggttagttcaatctacgaatgtataacattcttaaacaatatagcattcttggatgaatcatttcctagataccatagcatcgagttgatatctatcggtataagtaattcgcatgataagatttccataaactgctacaatcataaaaaaaatacatgggaaatgatatcttcacgtagatataggtgtagtttcgcagtggccgtcctggataatattatctatatgatgggtggatatgatcagtccccgtatagaagttcaaaggttatagcgtacaatacatgtacaaattcttggatatatgatataccagagctaaaatatcctcgttctaattgtgggggactggctgatgacgaatacatttattgtataggcggcatacgcgatcaggattcatcgttgacatctagtattgatagatggaagccatcaaaaccatattggcagaagtatgctaaaatgcgcgaaccaaaatgtgatatgggggttgcgatgttaaacggattaatatatgttataggtggaatcgttaaaggtgacacgtgtaccgacgcactagagagtttatcagaagatggatggatgaagcatcaacgtcttccaataaaaatgtccaatatgtcgacgattgttcatgatggcaagatttatatatctggaggttacaacaatagtagtgtagttaatgtaatatcgaatctagtccttagctataattcgatatatgatgaatggaccaaattatcatcattaaacattcctagaattaatcccgctctatggtcagcgcataataaattatatgtaggaggaggaatatctgatgatgttcgaactaatacatctgagacatacgacaaagaaaaagattgttggacattggataatggtcacgtgttaccacgcaattatataatgtataaatgcgaaccgattaaacataaatatccattggaaaaaacacagtacacgaatgattttctaaagtatttggaaagttttataggtagttgatagaacaaaatacataattttgtaaaaataaatcactttttatactaatatgacacgattaccaatacttttgttactaatatcattagtatacgctacaccttttcctcagacatctaaaaaaataggtgatgatgcaactctatcatgtaatcgaaataatacaaatgactacgttgttatgagtgcttggtataaggagcccaattccattattcttttagctgctaaaagcgacgtcttgtattttgataattataccaaggataaaatatcttacgactctccatacgatgatctagttacaactatcacaattaaatcattgactgctagagatgccggtacttatgtatgtgcattctttatgacatcaactacaaatgacactgataaagtagattatgaagaatactccacagagttgattgtaaatacagatagtgaatcgactatagacataatactatctggatctacacattcaccggaaactagttctgagaaacctgattatatagataattctaattgctcgtcggtattcgaaatctaagctcttttttttttttttttttttggcatataaataagtcgaccaccatggtgggtgaggatagcgtgctgatcaccgagaacatgcacatgaaactgtacatggagggcaccgtgaacgaccaccacttcaagtgcacatccgagggcgaaggcaagccctacgagggcacccagaccatgaagatcaaggtggtcgagggcggccctctccccttcgccttcgacatcctggctaccagcttcatgtacggcagcaaaacctttatcaaccacacccagggcatccccgacttctttaagcagtccttccctgagggcttcacatgggagaggatcaccacatacgaagacgggggcgtgctgaccgctacccaggacaccagcctccagaacggctgcctcatctacaacgtcaagatcaacggggtgaacttcccatccaacggccctgtgatgcagaagaaaacactcggctgggaggccagcaccgagatgctgtaccccgctgacagcggcctgagaggccatagccagatggccctgaagctcgtgggcgggggctacctgcactgctccctcaagaccacatacagatccaagaaacccgctaagaacctcaagatgcccggcttctacttcgtggacaggagactggaaagaatcaaggaggccgacaaagagacctacgtcgagcagcacgagatggctgtggccaggtactgcgacctgcctagcaaactggggcacagctgattaattaatttttatcgatctaattcaacaatgtctggagagcttcgcaggatcccgactccggaaccaattactgataaagaagatcatacagttacagacactgtctcatacactacagtaagtacatcatctggaattgtcactactaaatcaaccaccgatgatgcggatctttatgatacgtacaatgataatgatacagtaccaccaactactgtaggcggtagtacaacctctattagcaattataaaaccaaggactttgtagaaatatttggtattaccgcattaattatattgtcggccgtggcaattttctgtattacatattatatatataataaacgttcacgtaaatacaaaacagagaacaaagtctagatttttgacttacataaatgtctgggatagtaaaatctatcatattgagcggaccatctggtttaggaaagacagccatagccaaaagactatgggaatatatttggatttgtggtgtcccataccactagatttcctcgtcctatggaacgagaaggtgttgattaccattacgttaacagagaggccatctggaagggaatagccgccggaaactttctagaacatactgagtttttaggaaatatttacggaacttctaaaacagctgtgaatacagcggctattaataatcgtatttgtgtgatggatctaaacatcgacggtgttagaagtcttaaaaatacgtacctaatgccttactcggtgtatataagacctacctctcttaaaatggttgagaccaagcttcgtcgtagaaacactgaagctaacgatgagattcatcgtcgtgtgatgttggcaaaaactgacatggatgaggcaggtgaagccggtctattcgacactattatcattgaagatgatgtgaatttagcatatagtaagttaattcagatactacaggaccgtattagaatgtattttaacactaattagagacttaagacttaaaacttgataattaataatataactcgtttttatatgtgtctatttcaacgtctaatgtattagttaaatattaaaacttaccacgtaaaacttaaaatttaaaatgatatttcattgacagatagatcacacattatgaactttcaaggacttgtgttaactgacaattgcaaaaatcaatgggtcgttggaccattaataggaaaaggtggattcggtagtatttatactactaatgacaataattatgtagtaaaaatagagcccaaagctaacggatcattatttaccgaacaggcattttatactagagtacttaaaccatccgttatcgaagaatggaaaaaatctcacaatataaagcacgtaggtcttatcacgtgcaaggcatttggtctatacaaatccattaatgtggaatatcgattcttggtaattaatagattaggtgcagatctagatgcggtgatcagagccaataataatagactaccaaaaaggtcggtgatgttgatcggaatcgaaatcttaaataccatacaatttatgcacgagcaaggatattctcacggagatattaaagcgagtaatatagtcttagatcaaatagataagaataaattatatctagtggattacggattggtttctaaattcatgtctaatggcgaacatgttccatttataagaaatccaaataaaatggataacggtactctagaatttacacctatagattcgcataaaggatacgttgtatctagacgtggagatctagaaacacttggatattgtatgattagatggttgggaggtatcttaccatggactaagatatctgaaacaaagaattgtgcattagtaagtgccacaaaacagaaatatgttaacaatactgcgactttgttaatgaccagtttgcaatatgcacctagagaattgctgcaatatattaccatggtaaactctttgacatattttgaggaacccaattacgacaagtttcggcacatattaatgcagggtgtatattattaagtgtggtgtttggtcgataaaaattaaaaaataacttaatttattattgatctcgtgtgtacaaccgaaatcatggcgatgttttacgcacacgctctcggtgggtacgacgagaatcttcatgcctttcctggaatatcatcgactgttgccaatgatgtcaggaaatattctgttgtgtcagtttataataacaagtatgacattgtaaaagacaaatatatgtggtgttacagtcaggtgaacaagagatatattggagcactgctgcctatgtttgagtgcaatgaatatctacaaattggaaatccgatccatgatcaagaaggaaatcaaatctctatcatcacatatcgccacaaaaactactatgctctaagcggaatcgggtacgagagtctagacttgtgtttggaaggagtagggattcatcatcacgtacttgaaacaggaaacgctgtatatggaaaagttcaacatgattattctactatcaaagagaaggccaaagaaatgagtgcacttagtccaggacctatcatcgattaccacgtctggataggagattgtatctgtcaagttactgctgtggacgtacatggaaaggaaattatgaaaatgagattcaaaaagggtgcggtgcttccgatcccaaatctggtaaaagttaaacttggggagaatgatacagaaaatctttcttctactatatcggcggcaccatcgaggtaaccacctctctggaagacagcgtgaatcatgtactcatgaaacgtttggaaactatacgccatatgtggtctgttgtatatgatcattttgatattgtgaatggtaaagaatgctgttatgtgcatacgcattcatctaatcaaaatcctataccgagtactgtaaaaacaaatttgtacatgaagactatgggatcatgcattcaaatggattccatggaagctctagagtatcttagcgaactgaaggaatcaggtggatggagtcccagaccagaaatgcaggaatttgaatatccagatggagtggaagacactgaatcaattgagagattggcagaggagttcttcaatagatcagaacttcaggctggtgaatcagtcaaatttggtaattctattaattgttaaacatacatctgtttcagctaagcaactaagaacacgtatacggcagcagcttccttctatactctcatcttttaccaacacaaagggtggatatttgttcattggagttgataataatacacacaaagtatttggattcacggtgggttacgactacctcagactgatagagaatgatatagaaaagcatatcaaaagacttcgtgttgtgcatttctgtgagaagaaagaggacatcaagtacgcgtgtcgattcatcaaggtatataaacctggggatgagactacctcgacatacgtgtgcgctatcaaagtggaaagatgctgttgtgctgtgtttgcagattggccagaatcatggtatatggatactaatggtatcaagaagtattctccagatgaatgggtgtcacatataaaattttaattaatgtaactatagagaacaaataataaggttgtaatatcatatagacaataactaacaattaattagtaactgttatctcttttttaactaaccaactaactatatacctattaatacatcgtaattatagttcttaacatctattaatcattaattcgcttctttaattttttataaactaacattgttaattgaaaagggataacatgttacagaatataaattatatatggatttttttaaaaaggaaatacttgactggagtatatatttatctcttcattatatagcacgcgtgttttccaatttttccacatcccatataatacaggattataatctcgttcgaacatacgagaaagtggataaaacaatagttgattttttatctaggttgccaaatttattccatattttagaatatggggaaaatattctacatatttattctatggatgatgctaatacgaatattataattttttttctagatagagtattaaatattaataagaacgggtcatttatacacaatctcgggttatcatcatccattaatataaaagaatatgtatatcaattagttaataatgatcatccagataataggataagactaatgcttgaaaatggacgtagaacaagacattttttgtcctatatatcagatacagttaatatctatatatgtattttaataaatcatggattttatatagatgccgaagacagttacggttgtacattattacatagatgtatatatcactataagaaatcagaatcagaatcatacaatgaattaattaagatattgttaaataatggatcagatgtagataaaaaagatacgtacggaaacacaccttttatcctattatgtaaacacgatatcaacaacgtggaattgtttgagatatgtttagagaatgctaatatagactctgtagactttaatagatatacacctcttcattatgtctcatgtcgtaataaatatgattttgtaaagttattaatttctaaaggagcaaatgttaatgcgcgtaataaattcggaactactccattttattgtggaattatacacggtatctcgcttataaaactatatttggaatcagacacagagttagaaatagataatgaacatatagttcgtcatttaataatttttgatgctgttgaatctttagattatctattatccagaggagttattgatattaactatcgtactatatacaacgaaacatctatttacgacgctgtcagttataatgcgtataatacgttggtctatctattaaacaaaaatggtgattttgagacgattactactagtggatgtacatgtatttcggaagcagtcgcaaacaacaacaaaataataatggaagtactattgtctaaacgaccatctttgaaaattatgatacagtctatgatagcaattactaaacataaacagcataatgcagatttattgaaaatgtgtataaaatatactgcgtgtatgaccgattatgatactcttatagatgtacagtcgctacagcaatataaatggtatattttaagatgtttcgatgaaatagatatcatgaagagatgttatataaaaaataaaactgtattccaattagttttttgtatcaaagacattaatactttaatgagatacggtaaacatccttctttcgtgaaatgcactagtctcgacgtatacggaagtcgtgtacgtaatatcatagcatctattagatatcgtcagagattaattagtctattatccaagaagctggatcctggagataaatggtcgtgttttcctaacgaaataaaatataaaatattggaaaactttaacgataacgaactatccacatatctaaaaatcttataaacattattaaaatataaaatctaagtaggataaaatcacactacatcattgtttccttttagtgctcgacagtgtatactatttttaacgctcataaataaaaatgaaaacgatttccgttgttacgttgttatgcgtactacctgctgttgtttattcaacatgtactgtacccactatgaataacgctaaattaacgtctaccgaaacatcgtttaatgataaccagaaagttacgtttacatgtgatcagggatatcattctttggatccaaatgctgtctgtgaaacagataaatggaaatacgaaaatccatgcaaaaaaatgtgcacagtttctgattatgtctctgaactatataataaaccgctatacgaagtgaattccaccatgacactaagttgcaacggcgaaacaaaatattttcgttgcgaagaaaaaaatggaaatacttcttggaatgatactgttacgtgtcctaatgcggaatgtcaacctcttcaattagaacacggatcgtgtcaaccagttaaagaaaaatactcatttggggaatatatgactatcaactgtgatgttggatatgaggttattggtgcttcgtacataagttgtacagctaattcttggaatgttattccatcatgtcaacaaaaatgtgatatgccgtctctatctaacggattaatttccggatctacattttctatcggtggcgttatacatcttagttgtaaaagtggttttacactaacggggtctccatcatccacatgtatcgacggtaaatggaatcccatactcccaatatgtgtacgaactaacgaaaaatttgatccagtggatgatggtcccgacgatgagacagatttgagcaaactctcgaaagacgttgtacaatatgaacaagaaatagaatcgttagaagcaacttatcatataatcatagtggcgttgacaattatgggcgtcatatttttaatctccgttatagtattagtttgttcctgtgacaaaaataatgaccaatataagttccataaattgctaccgtaaatataaatccgttaaaataattaataatttaataacaaacaagtatcaaaagattaaagacttatagctagaatcaattgagatgtcttcttcagtggatgttgatatctacgatgccgttagagcatttttactcaggcactattataacaagagatttattgtgtatggaagaagtaacgccatattacataatatatacaggctatttacaagatgcgccgttataccgttcgatgatatagtacgtactatgccaaatgaatcacgtgttaaacaatgggtgatggatacacttaatggtataatgatgaatgaacgcgatgtttctgtaagcgttggcaccggaatactattcatggaaatgtttttcgattacaataaaaatagtatcaacaatcaactaatgtatgatataattaatagcgtatctataattctagctaatgagagatatagaagcgcttttaacgacgatggtatatacatccgtagaaatatgattaacaagttgtacggatacgcatctctaactactattggcacgatcgctggaggtgtttgttattatctgttgatgcatctagttagtttgtataaataattatttcaatatactagttaaaattttaagattttaaatgtataaaaaactaataacgtttttatttgtaataggtgcattagcatcctattcgaataatgagtacactccgtttaataaactgagtgtaaaactctatatagatggagtagataatatagaaaattcatatactgatgataataatgaattggtgttaaattttaaagagtacacaatttctattattacagagtcatgcgacgtcggatttgattccatagatatagatgttataaacgactataaaattattgatatgtataccattgactcgtctactattcaacgcagaggtcacacgtgtagaatatctaccaaattatcatgccattatgataagtacccttatattcacaaatatgatggtgatgagcgacaatattctattactgcagagggaaaatgctataaaggaataaaatatgaaataagtatgatcaacgatgatactctattgagaaaacatactcttaaaattggatctacttatatatttgatcgtcatggacatagtaatacatattattcaaaatatgatttttaaaaatttaaaatatattatcacttcagtgacagtagtcaaataacaaacaacaccatgagatatattataattctcgcagttttgttcattaatagtatacatgctaaaataactagttataagtttgaatccgtcaattttgattccaaaattgaatggactggggatggtctatacaatatatcccttaaaaattatggcatcaagacgtggcaaacaatgtatacaaatgtaccagaaggaacatacgacatatccgcatttccaaagaatgatttcgtatctttctgggttaaatttgaacaaggcgattataaagtggaagagtattgtacgggactatgcgtcgaagtaaaaattggaccaccgactgtaacattgactgaatacgacgaccatatcaatttgtacatcgagcatccgtatgctactagaggtagcaaaaagattcctatttacaaacgcggtgacatgtgtgatatctacttgttgtatacggctaacttcacattcggagattctaaagaaccagtaccatatgatatcgatgactacgattgcacgtctacaggttgcagcatagactttgtcacaacagaaaaagtgtgcgtgacagcacagggagccacagaagggtttctcgaaaaaattactccatggagttcgaaagtatgtctgacacctaaaaagagtgtatatacatgcgcaattagatccaaagaagatgttcccaatttcaaggacaaaatggccagagttatcaagagaaaatttaatacacagtctcaatcttatttaactaaatttctcggtagcacatcaaatgatgttaccacttttcttagcatgcttaacttgactaaatattcataactaatttttattaatgatacaaaaacgaaataaaactgcatattatacactggttaacgcccttataggctctaaccattttcaagatgaggtccctgattatagtccttctgttcccctctatcatctactccatgtctattagacgatgtgagaagactgaagaggaaacatggggattgaaaatagggttgtgtataattgccaaagatttctatcccgaaagaactgattgcagtgttcatctcccaactgcaagtgaaggattgataactgaaggcaatggattcagggatatacgaaacaccgataaattataaaaaaagcaatgtgtccgctgtttccgttaataatactattttcgtaactggcggattattcataaataactctaatagcacgatcgtggttaacaatatggaaaaacttgacatttataaagacaaacaatggtcgattatagaaatgcctatggctagggtatatcacggcattgactcgacatttggaatgttatattttgccggaggtctatccgttaccgaacaatatggtaatttagagaaaaacaacgagatatcttgttacaatcctagaacgaataagtggtttgatatttcatatactatttataagatatccatatcatcattgtgtaaactaaataacgtcttctatgtatttagtaaggacattggatatgtggaaaagtatgatggtgcatggaagttagtacatgatcgtctccccgctataaaggcattatcaacttctccttattgattgaaaatgaaaatataaatagtttttatgtatagcagtattaccctatagttttattgcttactactaacatggatacagatgttacaaatgtagaagatatcataaatgaaatagatagagagaaagaagaaatactaaaaaatgtagaaattgaaaataataaaaacattaacaagaatcatcccaatgaatatattagagaagcactcgttattaataccagtagtaatagtgattccattgataaagaagttatagaatgtatcagtcacgatgtaggaatatagatcatatctactaatttttataatcgatacaaaacataaaaaacaactcgttattacatagcaggcatggaatccttcaagtattgttttgataacgatggcaagaaatggattatcggaaatactttatattctggtaattcaatactctataaggtcagaaaaaatttcactagttcgttctacaattacgtaatgaagatagatcacaaatcacacaagccattgttgtctgaaatacgattctatatatctgtattggatcctttgactatcgacaactggacacgggaacgtggtataaagtatttggctattccagatctgtatggaattggagaaaccgatgattatatgttcttcgttataaagaattcgggaagagtattcgccccaaaggatactgaatcagtcttcgaagcatgcgtcactatgataaacacgttagagtttatacactctcgaggatttacccatggaaaaatagaaccgaggaatatactgattagaaataaacgtctttcactaattgactattctagaactaacaaactatacaagagtggaaactcacatatagattacaacgaggacatgataacttcaggaaatatcaattatatgtgtgtagacaatcatcttggagcaacagtttcaagacgaggagatttagaaatgttgggatattgcatgatagaatggttcggtggcaaacttccatggaaaaacgaaagtagtataaaagtaataaaacaaaaaaaagaatataaaaaatttatagctactttctttgaggactgttttcctgaaggaaatgaacctctggaattagttagatatatagaattagtatacacgttagattattctcaaactcctaattatgacagactacgtaaactgtttatacaagattgaaattatattcttttttttatagagtgtggtagtgttacggatatctaatattaatattagactatctctatcgcgctacacgaccaatatcgattactatggatatcttctatgaaaggagagaatgtatttatttctccagcgtcaatctcgtcagtattgacaatactgtattatggagctaatggatccactgctgaacagctatcaaaatatgtagaaacggaggagaacacggataaggttagcgctcagaatatctcattcaaatccatgaataaagtatatgggcgatattctgccgtgtttaaagattcctttttgagaaaaattggcgataagtttcaaactgttgacttcactgattgtcgcactatagatgcaatcaacaagtgtgtagatatctttactgaggggaaaatcaatccactattggatgaaccattgtctcctagcaattagtgccgtatactttaaagcaaaatggttgacgccattcgaaaaggaatttaccagtgattatcccttttacgtatctccgacggaaatggtagacgtaagtatgatgtctatgtacggcaaggcatttaatcacgcatctgtaaaagaatcattcggcaacttttcaatcatagaactgccatatgttggagatactagtatgatggtcattcttccagacaagattgatggattagaatccatagaacaaaatctaacagatacaaattttaagaaatggtgtgactttatggatgctatgtttatagatgttcacattcccaagtttaaggtaacaggctcgtataatctggtggatactctagtaaagtcaggactgacagaggtgttcggttcaactggagattatagcaatatgtgtaatttagatgtgagtgtcgacgctatgatccacaaaacgtatatagatgtcaatgaagagtatacagaagcagctgcagcaacttctgtactagtggcagactgtgcatcaacaattacaaatgagttctgtgcagatcatccgttcatctatgtgattaggcatgttgatggaaaaattcttttcgttggtagatattgctctccgacaactaattgttaaccattttttttaaaaaaaatagaaaaaacatgtggtattagtgcaggtcgttgttcttccaattgcaattggtaagatgacggccaactttagtacccacgtcttttcaccacagcactgtggatgtgacagactgaccagtattgatgacgtcaaacaatgtttgactgaatatatttattggtcgtcctatgcataccgcaacaggcaatgcgctggacaattgtattccacactcctctcttttagagatgatgcggaattagtgttcatcgacattcgcgagctggtaaaaaatatgccgtgggatgatgtcaaagattgtacagaaatcatccgttgttatataccggatgagcaaaaaaccatcagagagatttcggccatcatcggactttgtgcatatgctgctacttactggggaggtgaagaccatcccactagtaacagtctgaacgcattgtttgtgatgcttgagatgctaaattacgtggattataacatcatattccggcgtatgaattgatgagttgtacatcttgacattttctttcttctcttctccctttcttctcttctcccttcctccctcttctccctttcccagaaacaaacttttttacccactataaaataaaatgagtatactacctattatatttcttcctatatttttttattcttcattcgttcagacttttaacgcgtctgaatgtatcgacaaagggcaatattttgcatcattcatggagttagaaaacgagccagtaatcttaccatgtcctcaaataaatacgctatcatccggatataatatattagatattttatgggaaaaacgaggagcggataatgatagaattataccgatagataatggtagcaatatgctaattctgaacccgacacaatcagactctggtatttatatatgcattaccacgaacgaaacctactgtgacatgatgtcgttaaatttgacaatcgtgtctgtctcagaatcaaatatagatcttatctcgtatccacaaatagtaaatgagagatctactggcgaaatggtatgtcccaatattaatgcatttattgctagtaacgtaaacgcagatattatatggagcggacatcgacgccttagaaataagagacttaaacaacggacacctggaattattaccatagaagatgttagaaaaaatgatgctggttattatacatgtgttttagaatatatatacggtggcaaaacatataacgtaaccagaattgtaaaattagaggtacgggatagaataataccttctactatgcaattaccagatggcattgtaacttcaataggtagtaatttgactattgcatgcagagtatcgttgagacctcccacaacggacaccgacgtcttttggataagtaatggtatgtattacgaagaagatgatggggacggaaacggtagaataagtgtagcaaataaaatctatatgaccgataagagacgtgttattacatcccggttaaacattaatcctgtcaaggaagaagatgctacaacgtttacgtgtatggcgtttactattcctagcatcagcaaaacagttactgttagtataacgtgaatgtatgttgttacatttccatgtcaattgagtttataagaatttttatacattatcttccaacaaacaattgacgaacgtattgctatgattaactcccacgatactatgcatattattaatcattaacttgcagactatacctagtgctattttgacatactcgtgttcttgtgtaattgcggtatctatattattaaagtacgtaaatctagctatagttttattatttaattttagataatataccgtctccttatttttaaaaattgccacatcctttattaaatcatgaatgggaatttctatgtcatcgttagtatattgtgaacaacaagagcagatatctataggaaagggtggaatgcgatacattgatctatgtagttttaaaacacacgcgaactttgaagaatttatataaatcattccatcgatacatccttctatgttgacatgtatatatccaggaattcttttattaatgtcaggaaatgtataaactaaaacattgcccgaaagcggtgcctctatctgcgttatatccgttcttaacttacaaaatgtaaccaatacctttgcatgacttgttttgttcggcaacgttagtttaaacttgacgaatggattaattacaatagcatgatccgcgcatctattaagtttttttactttaacgcccttgtatgtttttacagagactttatctaaatttctagtgcttgtatgtgttataaatataacgggatatagaaccgaatcacctaccttagatacccaattacattttatcagatccagataataaacaaattttgtcgccctaactaattctatattgttatatattttacaattggttatgatatcatgtaataacttggagtctaacgcgcatcgtcgtacgtttatacaattgtgatttagtgtagtatatctacacatgtatttttccgcactatagtattctggactagtgataaaactatcgttatatctgtcttcaatgaactcatcgagatattgctctctgtcatattcatacacctgcataaactttctagacatcttacaatccgtgttattttaggatcatatttacatatttacgggtatatcaaagatgttagattagttaatgggaatcgtctataataatgaatattaaacaattatatgaggacttttaccacaaagcatcataaaaatgagtcgtcgtctgatttatgttttaaatatcaaccgcaaatcaactcataaaatacaagagaatgaaatatatacatattttagtcattgcaatatagaccatacttctacagaacttgattttgtagttaaaaactatgatctaaacagacgacaacctgtaactgggtatactgcactacactgctatttgtataataattactttacaaacgatgtactgaagatattattaaatcatgacgtaaatgtaacgatgaaaaccagtagcggacgtatgcctgtttatatattgcttactagatgttgtaatatttcacatgatgtagtgatagatatgatagacaaagataaaaaccacttattacatagagactattccaacctattactagagtatataaaatctcgttacatgttattgaaggaagaggatatcgatgagaacatagtatccactttattagataagggaatcgatcctaactttaaacaagacggatatacagcgttacattattattatttgtgtctcgcacacgtttataaactaggtgagtgtagaaaaccgataacgataaaaaaggccaagcgaattatttctttgtttatacaacatggagctaatctaaacgcgttagataattgtggtaatacaccattccatttgtatcttagtattgaaatgtgtaataatattcatatgactaaaatgctgttgacttttaatccgaatttcaaaatatgtaataatcatggattaacgcctatactatgttatataacttccgactacatacaacacgatattcttgttatgttaatacatcactatgaaacaaatgttggagaaatgccgatagatgagcgtcgtatgatcgtattcgagtttatcaaaacatattctacacgtccggcagattcgataacttatttgatgaataggtttaaaaatataaatatttatacccgctatgaaggaaagacattattacacgtagcatgtgaatataataatacacaagtaatagattatcttatacgtatcaacggagatataaatgcgttaaccgacaataacaaacacgctacacaactcattatagataacaaagaaaattccccatataccattaattgtttactgtatatacttagatatattgtagataagaatgtgataagatcgttggtggatcaacttccatctctacctatcttcgatataaaatcatttgagaaattcatatcctactgtatacttttagatgacacattttacgataggcacgttaagaatcgcgattctaaaacgtatcgatacgcattttcaaaatacatgtcgtttgataaatacgatggtataataactaaatgtcacgacgaaacaatgttactcaaactgtccactgttctagacactacactatatgcagttttaagatgtcataattcgagaaagttaagaagatacctcaacgagttaaaaaaatataataacgataagtcctttaaaatatattctaatattatgaatgagagataccttaatgtatattataaagatatgtacgtgtcaaaggtatatgataaactatttcctgttttcacagataaaaattgtctactaacattactaccttcagaaattatatacgaaatattatacatgctgacaattaacgatctttataatatatcgtatccacctaccaaagtatagttgtatttttctcatgcgatgtgtgtaaaaaaactgatattatataaatattttagtgccgtataataaagatgacgatgaaaatgatggtacatatatatttcgtatcattattgttattgctattccacagttacgccatagacatcgaaaatgaaatcacagaattcttcaataaaatgagagatactctaccagctaaagactctaaatggttgaatccagcatgtatgttcggaggcacaatgaatgatatagccgctctaggagagccattcagcgcaaagtgtcctcctattgaagacagtcttttatcgcacagatataaagactatgtggttaaatgggagaggctagaaaagaatagacggcgacaggtttctaataaacgtgttaaacatggtgatttatggatagccaactatacatctaaattcagtaaccgtaggtatttgtgcaccgtaactacaaagaatggtgactgtgttcagggtatagttagatctcatattaaaaaacctccttcatgcattccaaaaacatatgaactaggtactcatgataagtatggcatagacttatactgtggaattctttacgcaaaacattataataatataacttggtataaagataataaggaaattaatatcgacgacattaagtattcacaaacgggaaaggaattaattattcataatccagagttagaagatagcggaagatacgactgttacgttcattacgacgacgttagaatcaagaatgatatcgtagtatcaagatgtaaaatacttacggttataccgtcacaagaccacaggtttaaactaatactagatccgaaaatcaacgtaacgataggagaacctgccaatataacatgcactgctgtgtcaacgtcattattgatcgacgatgtactgattgaatgggaaaatccatccggatggcttataggattcgattttgatgtatactctgttttaactagtagaggcggtatcaccgaggcgaccttgtactttgaaaatgttactgaagaatatataggtaatacatataaatgtcgtggacacaactattattttgaaaaaacccttacaactacagtagtattggagtaaatatacaatgcatttttatatacattactgaattattattactgaattattattactgaattattattaattatatcgtatttgtgctatagaatggatgaagatacgcgactatctaggtatttgtatctcaccgatagagaacatataaatgtagactctattaaacagttgtgtaaaatatcagatcctaatgcatgttatagatgtggatgtacggctttacatgagtacttttataattatagatcagtcaacggaaaatacaagtatagatacaacggttactatcaatattattcatctagcgattatgaaaattataatgaatattattatgatagaactggtatgaacagtgagagtgataatatatcaatcaaaacagaatatgaattctatgatgaaacacaagatcaaagtacacaactagtaggttacgacattaaactcaaaaccaatgaggatgattttatggctatgatagatcagtgggtgtccatgattatatagatgaatcaattaataaagtagtatatggaagagagtctcacgtaagatggcgggatatatggcaagaacataatgatggcgtatacagtataggaaaggagtgcatagataatatatacgaagacaaccataccgtagacgaattctacaagatagacagcgtatcagatgtagatgacgcggaacacatatctccgataactaaaaaaccatagaatcagttgatgataatacctacatttctaatcttccgtataccatcaaatacaaaatattcgagcaacaataagtattttttatacctttaaaactgataaataaattttttctagtgatattttggcaagatgagaatcctatttctcatcgctttcatgtatgggtgtgttcactcatatgttaacgcggttgaaaccaaatgtccaaatctagacattgtaacatcttctggagaatttcattgttcaggatgtgtggaacatatgcctgagtttagctatatgtattggttggcaaaggatatgaaatcggacgaggataccaagtttatagaacatctgggtgatggcatcaaagaagatgaaaccgttcgtaccacagatagtggaatcgtcactctacgtaaagtccttcatgtgactgatactaataaatttgataattataggttcacttgtgtcctcgctacgctagatggcatttataaaaagaatgtttgctgaagtagttgtgtgctactatttttatttatgatataatctaatggaattaatttgaattgatatttatccaatactaaagattatattagaatcaaattaatcttttatacgagaaaaaataacgacatacgtcgtcaacaaattaaactttttatttattagttaactagcttatagaacttgctcattgttatgtttctaaaacgggtacggcatataggacaattatccgacgcaccggtttctcttcgtgttctatgccatatattgatgcatgttatgcaaaatatatgagtacacgaatccaataaaccaaagtatctatcgttttgagtaaacaacttcatagcaaattccacattctttttctttacttactctatacacgtcctcgtatttatttagtattttgatgatatccaactcagaaatggttgttgtattattgggtgtatttggagtataggtattattagctatgtaccaatttaccaaccctcttaatattgattgataatcacatcggttatccaattaataactaaattgtagtgtatatatagaccatatatgtttctatttttttgacagttacgtatagtttcagtaagttttgattgttgtattcctgtatctctagataagttagtcatatagtcccttccggcgatacgttttttccaagcccgaaattgattagccaaatgtgtatttatttttgtgatattgatataatatttcggataatgcatactgttagtcttatatcatttggttcatctatgtattgtaatattgttacatgatctatagatgatgtattgattttggcaggatcgaattccatatccgcgactaaacagtgaaaaaaatgtaaatactttttaaattttaaattagtaaaacttttttttattttttatgattccaaaaatactgaatacaaagtcctaaattataaatatggagatcatactaccacaacttattattatgtatacaaggccggtgtaatagatagatatatataattctattacaccggcagacaattaccgaccggtatttgtcgttaccaacataccgtataatatgtaatatacaattccataacccattgacagttgttatacatcaaaattgcaattcttttgattacgatgttataagaatgtagttaattgatgtatgatgttaatgtgtcctctttcctcttataacatcgtaatcaaaaacttttttataatatatacctaataatgtgtcttaatagttctcgtgattcgtcaaacaatcattcttataaaatataataaagcaacgtaaaaacacataaaaataagcgtaactaataagacaatggatatttacgacgataaaggtctacagactattaaactgtttaataatgaatttgattgtataaggaatgacatcagagaattatttaaacatgtaactgattccgatagtatacaacttccgatggaagacaattctgatattatagaaaatatcagaaaaatactatatagacgattaaaaaatgtagaatgtgttgacatcgataacacaataacttttatgaaatacgatccaaatgatgataataagcgtacgtgttctaattgggtacccttaactaataactatatggaatattgtctagtaatatatttggaaacaccgatatgtggaggcaaaataaaattataccaccctacaggaaatataaagtcggataaggatattatgtttgcaaagactctagactttaaatcaacgaaagtgttaactggacgtaaaacaattgccgttctagacatatccgtttcatataatagatcaatgactactattcactacaacgacgacgttgatatagatatacatactgataaaaatggaaaagagttatgttattgttatataacaatagatgatcattacttggttgatgtggaaactataggagttatagtcaatagatctggaaaatgtctgttagtaaataaccatctaggtataggtatcgttaaagataaacgtataagcgatagttttggagatgtatgtatggatacaatatttgacttttctgaagcacgagagttattttcattaactaatgatgataacaggaatatagcatgggacactgataaactagacgatgatacagatatatggactcccgtcacagaagatgattacaaatttctttctagactagtattgtatgcaaaatctcaatcggatactgtatttgactattatgttcttactggtgatacggaaccacccactgtattcattttcaaggtaactagattttactttaatatgccgaaataaaaaatttttgtataatatctagaggtagaggtattgtttagataaatacaaataacatagatacatcgcatacttagcatttttataaatatacataagacatacactttatacatttttgtaaaaatactcataaaaaaatttataaaaattatggcacaaccatatcttgtataggtagtttagttcgtcgagtgaacctataaacagataatagacaacacataataatgcctactaatacaagcataataccgggagatgggatatatgacgttgtagtgtttgggttttctgaacgttgatagtctactaatactacatgctgacatctaatgcctgtataaccatgagagcatctacaatacataccgtcaatatctctagcgtggatacagtcaccgtgtaaacaatatccatctccctctggaccgcataatctgatagctggaatatctgttgtagcgtttgtaatttctggcaatgtcgtttcgatagcgttaccactatcggcgaatgatctgattatcatagcagcgaacaacaacatcagataatttatcaacatttttgatggattctgtgtttatgctgtttctcagtgtgtgtttatgacaagattgggaattttatattattaattcagtaatataaactaataatatattgttaattgtgtaaataatataaaaataacaatacaatattgaatgtgttgctgttaaaaatgtatgtgttaatataatagaataaaataaatgagtatgatcattttagataacgattgattttatcattaccgcttcattcttatattctttgcttacggaacctatatttagaaacatctactaacaattttttatgcttgcattattaatggtatgtaatatgattgattgtgtacgcaataccaatttgttaagtatgaatacggggtacaaacataaattgaaatttaacattatttatttatgatatatatcgttatcgttaggtctataccatggatatctttaaagaactaatcttaaaacaccctgatgaaaatgttttgatttctccagtttccattttatctactttatctattctaaatcatggagcagctggttctacagctgaacaactatcaaaatatatagagaatatgaatgagaatacacccgatgacaataatgatgacatggaggtagatattccgtattgtgcgacactagctaccgcaaataaaatatacggtagcgatagtatcgagttccacgcctccttcctacaaaaaataaaagacgattttcaaactgtaaactttaataatgctaaccaaacaaaggaactaatcaacgaatgggttaagacaatgacaaatggtaaaattaattccttattgactagtccgctatccattaatactcgtatgacagttgttagcgccgtccattttaaagcaatgtggaaatatccattttctaaacatcttacatatacagacaagttttatatttctaagaatatagttaccagcgttgatatgatggtgggtaccgagaataacttgcaatatgtacatattaatgaattattcggaggattctctattatcgatattccatacgagggaaactctagtatggtaattatactaccggacgacatagaaggtatatataacatagaaaaaaatataacagatgaaaaatttaaaaaatggtgtggtatgttatctactaaaagtatagacttgtatatgccaaagtttaaagtggaaatgacagaaccgtataatctggtaccgattttagaaaatttaggacttactaatatattcggatattatgcagattttagcaagatgtgtaatgaaactatcactgtagaaaaatttctacatacgacgtttatagatgttaatgaggagtatacagaagcatcggccgttacaggagtatttacgattaacttttcgatggtatatcgtacgaaggtctacataaaccatccattcatgtacatgattaaagacaccacaggacgtatactttttatagggaaatactgctatccgcaataaatataaacaaatagacttttataaagagtcttcaacgataagtatatcgacatactacttatgctgcgaaagattctgaacgagaacgactatctcaccctcttggatcatatccgcactgctaaatactaaatctccactacactttttatcatcttatgaggaatgattgccttcgtgaaataggaataattagcaccagaatagctatggattattgtggtagagagtgcactattctatgtcgtctactggatgaagatgtgacgtacaaaaaaataaaactagaaattgaaacgtgtcacaacttatcaaaacatatagatagacgaggaaacaatgcgctacattgttacgtctccaataaatgcgatacagacattaagattgttctctcgcggagtcgagagactttgtagaaacaacgaaggattaactccgctaggagtatacagtaagcatagatacgtaaaatctcagattgtgcatctactgatatccagctattcaaattcctctaacgaactcaagtcgaatataaatgatttcgatctgtattcggataatatcgacttacgtctgctaaaatacctaattgtggataaacggatacgtccgtccaagaatacgaattatgcaatcaatggtctcggattggtggatatatacgtaacgacgcctaatccgagaccagaagtattgctatggcttcttaaatcagaatgttacagcaccggttacgtatttcgtacctgtatgtacgacagtgatatgtgtaagaactctcttcattactatatatcgtctcatagagaatctcaatctctatccaaggatgtaattaaatgtttgatcgataacaatgtttccatccatggcagagacgaaggaggatctttacccatccaatactactggtctttctcaaccatagatatagagattgttaaattattattaataaaggatgtggacacgtgtagagtatacgacgtcagccctatattagaggcgtattatctaaacaagcgatttagagtaaccccatataatgtagacatggaaatcgttaatcttcttattgagagacgtcatactcttgtcgacgtaatgcgtagtattacttcgtacgattccagagaatataaccactacatcatcgataacattctaaagagatttagacaacaggatgaatccatcgtacaagccatactgataaactacttacattacggcgatatggtcgttcgatgcatgttagataacggacaacaactatcctctacacgactactttgttaataataatctcgtcgatgtaaacgtcgtaaggtttatcgtggaaaatatggacacgcggctgtaaatcacgtatcgaacaatggccgtctatgtatgtacggtctgatattatcgagatttaataattgcgggtatcactgttatgaaaccatactgatagatgtatttgatatactaagcaagtacatggatgatatagatatgatcgataactctactatattacgcggtcgatgtcaataatatacaatttgcaaagcggttattggaatatggagcgagtatcacgctcgataatcaatacggccatccagaaaagcagttacagaagagaaaacaaaacgaaatcgttgttctacaagatgtctctccctacgacgattactacgtaaaaaagatactagcctactgcctattaagggacgagtcattcgcggaactacatagtaaattctgtttaaacgaggactataaaagtgtatttatgaaaaatatatcattcgataagatagattccatcatcgtgacataagtcgcctcaaagagattcgaatctccgacaccgacctgtatacggtatcacagctatcttaaagccatacattcagacagtcacatttcatttcccatgtacgacgatctcatagaacagtgccatctatcgatggagcgtaaaagtaaactcgtcgacaaagcactcaataaattagagtctaccatcggtcaatctagactatcgtatttgcctccggaaattatgcgcaatatcatctaaacagtatgttgtacggaaagaaccattacaaatattatccatgatagaaagaaaatatctatatgattggagaagtaggaaacaggaacaagacaacgattactacattattaaatcatgaagtccgtattatactcgtatatattgtttctctcatgtataataataaacggaagagatatagcaccgcatgcaccatccgatggaaagtgtaaagacaacgaatacaaacgccataatttgtgtccgggaacatacgcttccagattatgcgatagcaagactaacacacgatgtacgccgtgtggttcgggtaccttcacatctcgcaataatcatttacccgcttgtctaagttgtaacggaagacgcgatcgtgtaacacgactcacaatagaatctgtgaatgctctcccggatattattgtcttctcaaaggatcatccggatgcaaggcatgtgtttcccaaacaaaatgtggaataggatacggagtatccggagacgtcatctgttctccgtgtggtctcggaacatattctcacaccgtctcttccgcagataaatgcgaacccgtacccagaaatacgtttaactatatcgatgtggaaattaacctgtatccagttaacgacacgtcgtgtactcggacgaccactaccggtctcagcgaatccatctcaacgtcggaactaactattactatgaatcataaagactgtaatcccgtatttcgtgatggatacttctccgttcttaataaggtagcgacttcaggtttctttacaggagaaaggtgtgcactctgaatttcgagattaaatgcaataacaaagattcttcctccaaacagttaacgaaagcaaagaatgatactatcatgccgcattcggagacagtaactctagtgggcgacatctatatactatatagtaataccaatactcaagactacgaaactgatacaatctcttatcatgtgggtaatgttctcgatgtcgatagccatatgcccggtagttgcgatatacataaactgatcactaattccaaacccacccactttttatagtaagtttttcacccataaataataaatacaataattaatttctcgtaaaagtagaaaatatattctaatttattgcacggtaaggaagtagaatcataaagaacagtactcaatcaatagcaattatgaaacaatatatcgtcctggcatgcatgtgcctggcggcagctgctatgcctgccagtcttcagcaatcatcctcatcctcctcctcgtgtacggaagaagaaaacaaacatcatatgggaatcgatgttattatcaaagtcacaaagcaagaccaaacaccgaccaatgataagatttgccaatccgtaacggaaattacagagtccgagtcagatccagatcccgaggtggaatcagaagatgattccacatcagtcgaggatgtagatcctcctaccacttattactccatcatcggtggaggtctgagaatgaactttggattcaccaaatgtcctcagattaaatccatctcagaatccgctgatggaaacacagtgaatgctagattgtccagcgtgtccccaggacaaggtaaggactctcccgcgatcactcatgaagaagctcttgctatgatcaaagactgtgaagtgtctatcgacatcagatgtagcgaagaagagaaagacagcgacatcaagacccatccagtactcgggtctaacatctctcataagaaagtgagttacgaagatatcatcggttcaacgatcgtcgatacaaaatgcgtcaagaatctagagtttagcgttcgtatcggagacatgtgcaaggaatcatctgaacttgaggtcaaggatggattcaagtatgtcgacggatcggcatctgaaggtgcaaccgatgatacttcactcatcgattcaacaaaactcaaagcgtgtgtctgaatcgataactctattcatctgaaattggatgagtagggttaatcgaacgattcaggcacaccacgaattaaaaaagtgtaccggacactatattccggtttgcaaaacaaaaatgttcttaactacattcacaaaaagttacctctcgcgacttcttctttttctgtctcaatagtgtgatacgattatgacactattcctattcctattcctatttcctttcagagtatcacaaaaatattaaacctctttctgatggtctcataaaaaaagttttacaaaaatatttttattctctttctctctttgatggtctcataaaaaaagttttacaaaaatatttttattctctttctctctttgatggtctcataaaaaaagttttacaaaaatatttttattctctttctctctttgatggtctcataaaaaaagttttacaaaaatatttttattctctttctctctttgatggtctcataaaaaaagttttacaaaaatatttttattctctttctctctttgatggtctcataaaaaaagttttacaaaaatatttttattctctttctctctttgatggtctcataaaaaaagttttacaaaaatatttttattctctttctctctttgatggtctcataaaaaaagttttacaaaaatatttttattctctttctctctttgatggtctcataaaaaaagttttacaaaaatatttttattctctttctctctttgatggtctcataaaaaaagttttacaaaaatatttttattctctttctctctttgatggtctcataaaaaaagttttacaaaaatatttttattctctttctctctttgatggtctcataaaaaaagttttacaaaaatatttttattctctttctctctttgatggtctcataaaaaagttttacaaaaatatttttattctctttctctctttgatggtctcataaaaaagttttacaaaaatatttttattctctttctctctttgatggtctcataaaaaaagttttacaaaaatatttttattctctttctctctttgatggtctcataa

SEQ ID NO: 16 - DNA, 196963 bp, Artificial Sequence
  GLV-1h311
ttatgagaccatcaaagagagaaagagaataaaaatatttttgtaaaactttttttatgagaccatcaaagagagaaagagaataaaaatatttttgtaaaacttttttatgagaccatcaaagagagaaagagaataaaaatatttttgtaaaacttttttatgagaccatcaaagagagaaagagaataaaaatatttttgtaaaactttttttatgagaccatcaaagagagaaagagaataaaaatatttttgtaaaactttttttatgagaccatcaaagagagaaagagaataaaaatatttttgtaaaactttttttatgagaccatcaaagagagaaagagaataaaaatatttttgtaaaactttttttatgagaccatcaaagagagaaagagaataaaaatatttttgtaaaactttttttatgagaccatcaaagagagaaagagaataaaaatatttttgtaaaactttttttatgagaccatcaaagagagaaagagaataaaaatatttttgtaaaactttttttatgagaccatcaaagagagaaagagaataaaaatatttttgtaaaactttttttatgagaccatcaaagagagaaagagaataaaaatatttttgtaaaactttttttatgagaccatcaaagagagaaagagaataaaaatatttttgtaaaactttttttatgagaccatcaaagagagaaagagaataaaaatatttttgtaaaactttttttatgagaccatcaaagagagaaagagaataaaaatatttttgtaaaactttttttatgagaccatcagaaagaggtttaatatttttgtgatactctgaaaggaaataggaataggaataggaatagtgtcataatcgtatcacactattgagacagaaaaagaagaagtcgcgagaggtaactttttgtgaatgtagttaagaacatttttgttttgcaaaccggaatatagtgtccggtacacttttttaattcgtggtgtgcctgaatcgttcgattaaccctactcatccaatttcagatgaatagagttatcgattcagacacacgctttgagttttgttgaatcgatgagtgaagtatcatcggttgcaccttcagatgccgatccgtcgacatacttgaatccatccttgacctcaagttcagatgattccttgcacatgtctccgatacgaacgctaaactctagattcttgacgcattttgtatcgacgatcgttgaaccgatgatatcttcgtaactcactttcttatgagagatgttagacccgagtactggatgggtcttgatgtcgctgtctttctcttcttcgctacatctgatgtcgatagacacttcacagtctttgatcatagcaagagcttcttcatgagtgatcgcgggagagtccttaccttgtcctggggacacgctggacaatctagcattcactgtgtttccatcagcggattctgagatggatttaatctgaggacatttggtgaatccaaagttcattctcagacctccaccgatgatggagtaataagtggtaggaggatctacatcctcgactgatgtggaatcatcttctgattccacctcgggatctggatctgactcggactctgtaatttccgttacggattggcaaatcttatcattggtcggtgtttggtcttgctttgtgactttgataataacatcgattcccatatgatgtttgttttcttcttccgtacacgaggaggaggatgaggatgattgctgaagactggcaggcatagcagctgccgccaggcacatgcatgccaggacgatatattgtttcataattgctattgattgagtactgttctttatgattctacttccttaccgtgcaataaattagaatatattttctacttttacgagaaattaattattgtatttattatttatgggtgaaaaacttactataaaaagtgggtgggtttggaattagtgatcagtttatgtatatcgcaactaccgggcatatggctatcgacatcgagaacattacccacatgataagagattgtatcagtttcgtagtcttgagtattggtattactatatagtatatagatgtcgcccactagagttactgtctccgaatgcggcatgatagtatcattctttgctttcgttaactgtttggaggaagaatctttgttattgcatttaatctcgaaattcagagtgcacacctttctcctgtaaagaaacctgaagtcgctaccttattaagaacggagaagtatccatcacgaaatacgggattacagtctttatgattcatagtaatagttagttccgacgttgagatggattcgctgagaccggtagtggtcgtccgagtacacgacgtgtcgttaactggatacaggttaatttccacatcgatatagttaaacgtatttctgggtacgggttcgcatttatctgcggaagagacggtgtgagaatatgttccgagaccacacggagaacagatgacgtctccggatactccgtatcctattccacattttgtttgggaaacacatgccttgcatccggatgatcctttgagaagacaataatatccgggagagcattcacagattctattgtgagtcgtgttacacgatcgcgtcttccgttacaacttagacaagcgggtaaatgattattgcgagatgtgaaggtacccgaaccacacggcgtacatcgtgtgttagtcttgctatcgcataatctggaagcgtatgttcccggacacaaattatggcgtttgtattcgttgtctttacactttccatcggatggtgcatgcggtgctatatctcttccgtttattattatacatgagagaaacaatatatacgagtataatacggacttcatgatttaataatgtagtaatcgttgtcttgttcctgtttcctacttctccaatcatatagatattttctttctatcatggataatatttgtaatggttctttccgtacaacatactgtttagatgatattgcgcataatttccggaggcaaatacgatagtctagattgaccgatggtagactctaatttattgagtgctttgtcgacgagtttacttttacgctccatcgatagatggcactgttctatgagatcgtcgtacatgggaaatgaaatgtgactgtctgaatgtatggctttaagatagctgtgataccgtatacaggtcggtgtcggagattcgaatctctttgaggcgacttatgtcacgatgatggaatctatcttatcgaatgatatatttttcataaatacacttttatagtcctcgtttaaacagaatttactatgtagttccgcgaatgactcgtcccttaataggcagtaggctagtatcttttttacgtagtaatcgtcgtagggagagacatcttgtagaacaacgatttcgttttgttttctcttctgtaactgcttttctggatggccgtattgattatcgagcgtgatactcgctccatattccaataaccgctttgcaaattgtatattattgacatcgaccgcgtaatatagtagagttatcgatcatatctatatcatccatgtacttgcttagtatatcaaatacatctatcagtatggtttcataacagtgatacccgcaattattaaatctcgataatatcagaccgtacatacatagacggccattgttcgatacgtgatttacagccgcgtgtccatattttccacgataaaccttacgacgtttacatcgacgagattattattaacaaagtagtcgtgtagaggatagttgttgtccgttatctaacatgcatcgaacgaccatatcgccgtaatgtaagtagtttatcagtatggcttgtacgatggattcatcctgttgtctaaatctctttagaatgttatcgatgatgtagtggttatattctctggaatcgtacgaagtaatactacgcattacgtcgacaagagtatgacgtctctcaataagaagattaacgatttccatgtctacattatatggggttactctaaatcgcttgtttagataatacgcctctaatatagggctgacgtcgtatactctacacgtgtccacatcctttattaataataatttaacaatctctatatctatggttgagaaagaccagtagtattggatgggtaaagatcctccttcgtctctgccatggatggaaacattgttatcgatcaaacatttaattacatccttggatagagattgagattctctatgagacgatatatagtaatgaagagagttcttacacatatcactgtcgtacatacaggtacgaaatacgtaaccggtgctgtaacattctgatttaagaagccatagcaatacttctggtctcggattaggcgtcgttacgtatatatccaccaatccgagaccattgattgcataattcgtattcttggacggacgtatccgtttatccacaattaggtattttagcagacgtaagtcgatattatccgaatacagatcgaaatcatttatattcgacttgagttcgttagaggaatttgaatagctggatatcagtagatgcacaatctgagattttacgtatctatgcttactgtatactcctagcggagttaatccttcgttgtttctacaaagtctctcgactccgcgagagaacaatcttaatgtctgtatcgcatttattggagacgtaacaatgtagcgcattgtttcctcgtctatctatatgttttgataagttgtgacacgtttcaatttctagttttatttttttgtacgtcacatcttcatccagtagacgacatagaatagtgcactctctaccacaataatccatagctattctggtgctaattattcctatttcacgaaggcaatcattcctcataagatgataaaaagtgtagtggagatttagtatttagcagtgcggatatgatccaagagggtgagatagtcgttctcgttcagaatctttcgcagcataagtagtatgtcgatatacttatcgttgaagactctttataaaagtctatttgtttatatttattgcggatagcagtatttccctataaaaagtatacgtcctgtggtgtctttaatcatgtacatgaatggatggtttatgtagaccttcgtacgatataccatcgaaaagttaatcgtaaatactcctgtaacggccgatgcttctgtatactcctcattaacatctataaacgtcgtatgtagaaatttttctacagtgatagtttcattacacatcttgctaaaatctgcataatatccgaatatattagtaagtcctaaattttctaaaatcggtaccagattatacggttctgtcatttccactttaaactttggcatatacaagtctatacttttagtagataacataccacaccattttttaaatttttcatctgttatatttttttctatgttatatataccttctatgtcgtccggtagtataattaccatactagagtttccctcgtatggaatatcgataatagagaatcctccgaataattcattaatatgtacatattgcaagttattctcggtacccaccatcatatcaacgctggtaactatattcttagaaatataaaacttgtctgtatatgtaagatgtttagaaaatggatatttccacattgctttaaaatggacggcgctaacaactgtcatacgagtattaatggatagcggactagtcaataaggaattaattttaccatttgtcattgtcttaacccattcgttgattagttcctttgtttggttagcattattaaagtttacagtttgaaaatcgtcttttattttttgtaggaaggaggcgtggaactcgatactatcgctaccgtatattttatttgcggtagctagtgtcgcacaatacggaatatctacctccatgtcatcattattgtcatcgggtgtattctcattcatattctctatatattttgatagttgttcagctgtagaaccagctgctccatgatttagaatagataaagtagataaaatggaaactggagaaatcaaaacattttcatcagggtgttttaagattagttctttaaagatatccatggtatagacctaacgataacgatatatatcataaataaataatgttaaatttcaatttatgtttgtaccccgtattcatacttaacaaattggtattgcgtacacaatcaatcatattacataccattaataatgcaagcataaaaaattgttagtagatgtttctaaatataggttccgtaagcaaagaatataagaatgaagcggtaatgataaaatcaatcgttatctaaaatgatcatactcatttattttattctattatattaacacatacatttttaacagcaacacattcaatattgtattgttatttttatattatttacacaattaacaatatattattagtttatattactgaattaataatataaaattcccaatcttgtcataaacacacactgagaaacagcataaacacagaatccatcaaaaatgttgataaattatctgatgttgttgttcgctgctatgataatcagatcattcgccgatagtggtaacgctatcgaaacgacattgccagaaattacaaacgctacaacagatattccagctatcagattatgcggtccagagggagatggatattgtttacacggtgactgtatccacgctagagatattgacggtatgtattgtagatgctctcatggttatacaggcattagatgtcagcatgtagtattagtagactatcaacgttcagaaaacccaaacactacaacgtcatatatcccatctcccggtattatgcttgtattagtaggcattattatgtgttgtctattatctgtttataggttcactcgacgaactaaactacctatacaagatatggttgtgccataatttttataaatttttttatgagtatttttacaaaaatgtataaagtgtatgtcttatgtatatttataaaaatgctaagtatgcgatgtatctatgttatttgtatttatctaaacaatacctctacctctagatattatacaaaaattttttatttcggcatattaaagtaaaatctagttaccttgaaaatgaatacagtgggtggttccgtatcaccagtaagaacataatagtcaaatacagtatccgattgagattttgcatacaatactagtctagaaagaaatttgtaatcatcttctgtgacgggagtccatatatctgtatcatcgtctagtttatcagtgtcccatgctatattcctgttatcatcattagttaatgaaaataactctcgtgcttcagaaaagtcaaatattgtatccatacatacatctccaaaactatcgcttatacgtttatctttaacgatacctatacctagatggttatttactaacagacattttccagatctattgactataactcctatagtttccacatcaaccaagtaatgatcatctattgttatataacaataacataactcttttccatttttatcagtatgtatatctatatcaacgtcgtcgttgtagtgaatagtagtcattgatctattatatgaaacggatatgtctagaacggcaattgttttacgtccagttaacactttcgttgatttaaagtctagagtctttgcaaacataatatccttatccgactttatatttcctgtagggtggtataattttattttgcctccacatatcggtgtttccaaatatattactagacaatattccatatagttattagttaagggtacccaattagaacacgtacgcttattatcatcatttggatcgtatttcataaaagttattgtgttatcgatgtcaacacattctacattttttaatcgtctatatagtatttttctgatattttctataatatcagaattgtcttccatcggaagttgtatactatcggaatcagttacatgtttaaataattctctgatgtcattccttatacaatcaaattcattattaaacagtttaatagtctgtagacctttatcgtcgtaaatatccattgtcttattagttacgcttatttttatgtgtttttacgttgctttattatattttataagaatgattgtttgacgaatcacgagaactattaagacacattattaggtatatattataaaaaagtttttgattacgatgttataagaggaaagaggacacattaacatcatacatcaattaactacattcttataacatcgtaatcaaaagaattgcaattttgatgtataacaactgtcaatgggttatggaattgtatattacatattatacggtatgttggtaacgacaaataccggtcggtaattgtctgccggtgtaatagaattatatatatctatctattacaccggccttgtatacataataataagttgtggtagtatgatctccatatttataatttaggactttgtattcagtatttttggaatcataaaaaataaaaaaaagttttactaatttaaaatttaaaaagtatttacatttttttcactgtttagtcgcggatatggaattcgatcctgccaaaatcaatacatcatctatagatcatgtaacaatattacaatacatagatgaaccaaatgatataagactaacagtatgcattatccgaaatattatatcaatatcacaaaaataaatacacatttggctaatcaatttcgggcttggaaaaaacgtatcgccggaagggactatatgactaacttatctagagatacaggaatacaacaatcaaaacttactgaaactatacgtaactgtcaaaaaaatagaaacatatatggtctatatatacactacaatttagttattaattggataaccgatgtgattatcaatcaatattaagagggttggtaaattggtacatagctaataatacctatactccaaatacacccaataatacaacaaccatttctgagttggatatcatcaaaatactaaataaatacgaggacgtgtatagagtaagtaaagaaaaagaatgtggaatttgctatgaagttgtttactcaaaacgatagatactttggtttattggattcgtgtactcatatattttgcataacatgcatcaatatatggcatagaacacgaagagaaaccggtgcgtcggataattgtcctatatgccgtacccgttttagaaacataacaatgagcaagttctataagctagttaactaataaataaaaagtttaatttgttgacgacgtatgtcgttattttttctcgtataaaagattaatttgattctaatataatctttagtattggataaatatcaattcaaattaattccattagattatatcataaataaaaatagtagcacacaactacttcagcaaacattctttttataaatgccatctagcgtagcgaggacacaagtgaacctataattatcaaatttattagtatcagtcacatgaaggactttacgtagagtgacgattccactatctgtggtacgaacggtttcatcttctttgatgccatcacccagatgttctataaacttggtatcctcgtccgatttcatatcctttgccaaccaatacatatagctaaactcaggcatatgttccacacatcctgaacaatgaaattctccagaagatgttacaatgtctagatttggacatttggtttcaaccgcgttaacatatgagtgaacacacccatacatgaaagcgatgagaaataggattctcatcttgccaaaatatcactagaaaaaatttatttatcagttttaaaggtataaaaaatacttattgttgctcgaatattttgtatttgatggtatacggaagattagaaatgtaggtattatcatcaactgattctatggttttatgtattctatcatgtttcactattgcgttggaaataatatcatatgcttccacatatattttattttgttttaactcataatactcacgtaattctggattattggcatatctatgaataattttagctccatgatcagtaaatattaatgagaacatagtattaccacctaccattatttttttcatctcattcaattcttaattgcaaagatctatataatcattatagcgttgacttatggactctggaatcttagacgatgtacagtcatctataatcatggcatatttaatacattgttttatagcatagtcgttatctacgatgttagatatttctctcaatgaatcaatcacacaatctaatgtaggtttatgacataatagcattttcagcagttcaatgtttttagattcgttgatggcaatggctatacatgtatatccgttatttgatctaatgttgacatctgaaccggattctagcagtaaagatactagagattgtttattatatctaacagccttgtgaagaagtgtttctcctcgtttgtcaatcatgttaatgtctttaagataaggtaggcaaatgtttatagtactaagaattgggcaagcataagacatgtcacaaagacccttttttgtatgtataagtgtaaaaattataacatccatagttggatttacataggtgtccaatcgggatctctccatcatcgagataattgatggcatctcccttccttttttagtagatatttcatcgtgtaagaatcaatattaatatttctaaagtatccgtgtatagcctctttatttaccacagctccatattccactagagggatatcgccgaatgtcatatactcaattagtatatgttggaggacatccgagttcattgttttcaatatcaaagagatggtttccttatcatttctccatagtggtacaatactacacattattccgtgcggctttccattttccaaaaacaatttgaccaaatctaaatctacatctttattgtatctataatcactatttagataatcagccataattcctcgagtgcaacatgttagatcgtctatatatgaataagcagtgttatctattcctttcattaacaatttaacgatgtctatatctatatgagatgacttaatataatattgaagagctgtacaatagtttttatctataaaagacggcttgattccgtgattaattagacatttaacaacttccggacgcacatatgctctcgtatccgactctgaatacagatgagagatgatatacagatgcaatacggtaccgcaatttcgtagttgataatcatcatacgcgtatcagtactcgtcctcataaagaacactgcagccattttctatgaacaaatcaataattttagaaacaggatcattgtcattacataattttctataactgaacgatggttttcacatttaacactcaagtcaaatccatgttctaccaacacctttatcaagtcaacgtctacatttttggatttcatatagctgaatatattaaagttatttatgttgctaaatccagtggcttctagtagagccatcgctatatccttattaactttaacatgtctactatttgtgtattcttctaatggggtaagctgtctccaatttttgcgtaatggattagtgccactgtctagtagtagtttgacgacctcgacattattacaatgctcattaaaaaggtatgcgtgtaaagcattattcttgaattggttcctggtatcattaggatctctgtctttcaacatctgtttaagttcatcaagagccacctcctcattttccaaatagtcaaacattttgactgaatgagctactgtgaactctatacacccacacaactaatgtcattaaatatcatgtcaaaaacttgtacaattattaataaaaataatttagtgtttaaattttaccagttccagattttacacctccgttaatacctccattaaccccactggacgatcctcctccccacattccaccgccaccagatgtataagttttagatcctttattactaccatcatgtccatggataaagacactccacatgccgccactaccccctttagaagacatattaataagacttaaggacaagtttaacaataaaattaatcacgagtaccctactaccaacctacactattatatgattatagtttctatttttacagtaccttgactaaagtttctagtcacaagagcaatactaccaacctacactattatatgattatagtttctatttttataggaacgcgtacgagaaaatcaaatgtctaatttctaacggtagtgttgataaacgattgttatccgcggatacctcctctatcatgtcgtctattttcttactttgttctattaacttattagcattatatattatttgattataaaacttatattgcttattagcccaatctgtaaatatcggattattaacatatcgtttctttgtaggtttatttaacatgtacatcactgtaagcatgtccttaccatttattttaatttgacgcatatccgcaatttctttttcgcagtcggttataaattctatatatgatggatacatgctacatgtgtacttataatcgactaatatgaagtacttgatacatattttcagtaacgatttattattaccacctatgaataagtacctgtgatcgtctaggtaatcaactgttttcttaatacattcgatggttggtaatttactcagaataatttccaatatcttaatatataattctgctatttctgggatatatttatctgccagtataacacaaatagtaatacatgtaaacccatattttgttattatattaatgtctgcgccattatctattaaccattctactaggctgacactatgcgactcaatacaatgataaagtatactacatccatgtttatctattttgtttatatcatcaatatacggcttacaaagttttagtatcgataacacatccaactcacgcatagagaaggtagggaataatggcataatatttattaggttatcatcattgtcattatctacaactaagtttccattttttaaaatatactcgacaactttaggatctctattgccaaatttttgaaaatatttatttatatgcttaaatctatataatgtagctccttcatcaatcatacatttaataacattgatgtatactgtatgataagatacatattctaacaatagatcttgtatagaatctgtatatcttttaagaattgtggatattaggatattattacataaactattacacaattctaaaatataaaacgtatcacggtcgaataatagttgatcaactatataattatcgattttgtgatttttcttcctaaactgtttacgtaaatagttagatagaatattcattagttcatgaccactatagttactatcgaataacgcgtcaaatatttcccgtttaatatcgcatttgtcaagataataatagagtgtggtatgttcacgataagtataataacgcatctctttttcgtgtgaaattaaatagtttattacgtccaaagatgtagcataaccatcttgtgacctagtaataatataataatagagaactgttttacccattctatcatcataatcagtggtgtagtcgtaatcgtaatcgtctaattcatcatcccaattataatattcaccagcacgtctaatctgttctattttgatcttgtatccatactgtatgttgctacatgtaggtattcctttatccaataatagtttaaacacatctacattgggatttgatgttgtagcgtatttttctacaatattaataccatttttgatactatttatttctatacctttcgaaattagtaatttcaataagtctatattgatgttatcagaacatagatattcgaatatatcaaaatcattgatatttttatagtcgactgacgacaataacaaaatcacaacatcgtttttgatattattatttttcttggtaacgtatgcctttaatggagtttcaccatcatactcatataatggatttgcaccactttctatcaatgattgtgcactgctggcatcgatgttaaatgttttacaactatcatagagtatcttatcgttaaccatgattggttgttgatgctatcgcattttttggtttctttcatttcagttatgtatggatttagcacgtttgggaagcatgagctcatatgatttcagtactgtagtgtcagtactattagtttcaataagatcaatctctagatctatagaatcaaaacacgataggtcagaagataatgaatatctgtaggcttcttgttgtactgtaacttctggttttgttagatggttgcatcgtgctttaacgtcaatggtacaaattttatcctcgctttgtgtatcatattcgtccctactataaaattgtatattcagattatcatgcgatgtgtatacgctaacggtatcaataaacggagcacaccatttagtcataaccgtaatccaaaaatttttaaagtatatcttaacgaaagaagttgtgtcattgtctacggtgtatggtactagatcctcataagtgtatatatctagagtaatgtttaatttattaaatggttgataatatggatcctcgtgacaatttccgaagatggaaataagacataaacacgcaataaatctaattgcggacatggttactccttaaaaaaatacgaataatcaccttggctatttagtaagtgtcatttaacactatactcatattaatccatggactcataatctctatacgggattaacggatgttctatatacggggatgagtagttctcttctttaactttatactttttactaatcatatttagactgatgtatgggtaatagtgtttgaagagctcgttctcatcatcagaataaatcaatatctctgtttttttgttatacagatgtattacagcctcatatattacgtaatagaacgtgtcatctaccttattaactttcaccgcatagttgtttgcaaatacggttaatcctttgacctcgtcgatttccgaccaatctgggcgtataatgaatctaaactttaattgcttgtaatcattcgaaataatttttagtttgcatccgtagttatcccctttatgtaactgtaaatttctcaacgcgatatctccattaataatgatgtcgaattcgtgctgtatacccatactgaatggatgaacgaataccgacggcgttaatagtaatttactttttcatctttacatattgggtactagttttactatcataagtttataaattccacaagctactatggaataagccaaccatcttagtataccacacatgtcttaaagtttattaattaattacatgttgttttatatatatcgctacgaatttaaagagaaattagtttaggaagaaaaattatctatctacatcatcacgtctctgtattctacgatagagtgctactttaagatgcgacagatccgtgtcatcaaatatatactccattaaaatgattattccggcagcgaacttgatattggatatatcacaacctttgttaatatctacgacaatagacagcagtcccatggttccataaacagtgagtttatctttctttgaagagatattttgtagagatcttataaaactgtcgaatgacatcgcatttatatctttagctaaatcgtatatgttaccatcgtaatatctaaccgcgtctatcttaaacgtttccatcgctttaaagacgtttccgatagatggtctcatttcatcagtcatactgagccaacaaatataatcgtgtataacatctttgatagaatcagactctaaagaaaacgaatcggctttattatacgcattcatgataaacttaatgaaaaatgtttttcgttgtttaagttggatgaatagtatgtcttaataattgttattatttcattaattaatatttagtaacgagtacactctataaaaacgagaatgacataactaatcataactagttatcaaagtgtctaggacgcgtaattttcatatggtatagatcctgtaagcattgtctgtattctggagctattttctctatcgcattagtgagttcagaatatgttataaatttaaatcgaataacgaacataactttagtaaagtcgtctatattaactcttttattttctagccatcgtaataccatgtttaagatagtatattctctagttactacgatctcatcgttgtctagaatatcacatactgaatctacatccaattttagaaattggtctgtgttacatatctcttctatattattgttgatgtattgtcgtagaaaactattacgtagaccattttctttataaaacgaatatatagtactccaattatctttaccgatatatttgcacacataatccattctctcaatcactacatctttaagattttcgttgttaagatatttggctaaactatataattctattagatcatcaacagaatcagtatatatttttctagatccaaagacgaactctttggcgtcctctataatattcccagaaaagatattttcgtgttttagtttatcgagatctgatctgttcatatacgccatgattgtacggtacgttatgataaccgcataaaataaaaatccattttcatttttaaccaatactattcataattgagattgatgtaatactttgttactttgaacgtaaagacagtacacggatccgtatctccaacaagcacgtagtaatcaaatttggtgttgttaaacttcgcaatattcatcaatttagatagaaacttatactcatcatctgttttaggaatccatgtattattaccactttccaacttatcattatcccaggctatgtttcgtccatcatcgttgcgcagagtgaataattcttttgtattcggtagttcaaatatatgatccatgcatagatcggcaaagctattgtagatgtgatttttcctaaatctaatataaaactcgtttactagcaaacactttcctgatttatcgaccaagacacatatggtttctaaatctatcaagtggtggggatccatagttatgacgcagtaacatatattattacattcttgactgtcgctaatatctaaatatttattgttatcgtattggattctgcatatagatggcttgtatgtcaaagatatagaacacataaccaatttatagtcgcgctttacattctcgaatctaaagttaagagatttagaaaacattatatcctcggatgatgttatcactgtttctggagtaggatatattaaagtctttacagatttcgtccgattcaaataaatcactaaataatatcccacattatcatctgttagagtagtatcattaaatctattatattttatgaaagatatatcactgctcacctctatatttcgtacatttttaaactgtttgtataatatctctctgatacaatcagatatatctattgtgtcggtagacgataccgttacatttgaattaatggtgttccattttacaacttttaacaagttgaccaattcatttctaatagtatcaaactctccatgattaaatattttaatagtatccattttatatcactacggacacaaagtagctgacataaaccattgtataatttttatgttttatgtttattagcgtacacattttggaagttccggcttccatgtatttcctggagagcaagtagatgatgaggaaccagatagtttatatccgtacttgcacttaaagtctacattgtcgttgtatgagtatgatcttttaaacccgctagacaagtatccgtttgatattgtaggatgtggacatttaacaatctgacacgtgggtggatcggaccattctcctcctgaacacaggacactagagttaccaatcaacgaatatccactattgcaactataagttacaacgctcccatcggtataaaaatcctcgtatccgttatgtcttccgttggatatagatggaggggattggcatttaacagattcacaaataggtgcctcgggattccataccatagatccagtagatcctaattcacaatacgatttagattcaccgatcaactgatatccgctattacaagagtacgttatactagagccaaagtctactccaccaatatcaagttggccattatcgatatctcgaggcgatgggcatctccgtttaatacattgattaaagagtgtccatccagtacctgtacatttagcatatataggtcccattttttgctttctgtatccaggtagacatagatattctatagtgtctcctatgttgtaattagcattagcatcagtctccacactattcttaaatttcatattaatgggtcgtgacggaatagtacagcatgatagaacgcatcctattcccaacaatgtcaggaacgtcacgctctccaccttcatatttatttatccgtaaaaatgttatcctggacatcgtacaaataataaaaagcccatatatgttcgctattgtagaaattgtttttcacagttgctcaaaaacgatggcagtgacttatgagttacgttacactttggagtctcatctttagtaaacatatcataatattcgatattacgagttgacatatcgaacaaattccaagtatttgattttggataatattcgtattttgcatctgctataattaagatataatcaccgcaagaacacacgaacatctttcctacatggttaaagtacatgtacaattctatccatttgtcttccttaactatatatttgtatagataattacgagtctcgtgagtaattccagtaattacatagatgtcgccgtcgtactctacagcataaactatactatgatgtctaggcatgggagacttttttatccaacgatttttagtgaaacattccacatcgtttaatactacatatttctcatacgtggtataaactccacccattacatatatatcatcgtttacgaataccgacgcgcctgaatatctaggagtaattaagtttggaagtcttatccatttcgaagtgccgtgtttcaaatattctgccacacccgttgaaatagaaaattctaatcctcctattacatataactttccatcgttaacacaagtactaacttctgattttaacgacgacatattagtaaccgttttccattttttcgttttaagatctacccgcgatacggaataaacatgtctattgttaatcatgccgccaataatgtatagacaattatgtaaaacatttgcattatagaattgtctatctgtattaccgactatcgtccaatattctgttctaggagagtaatgggttattgtggatatataatcagagtttttaatgactactatattatgttttataccatttcgtgtcactggctttgtagatttggatatagttaatcccaacaatgatatagcattgcgcatagtattagtcataaacttgggatgtaaaatgttgatgatatctacatcgtttggatttttatgtatccactttaataatatcatagctgtaacatcctcatgatttacgttaacgtcttcgtgggataagatagttgtcagttcatcctttgataattttccaaattctggatcggatgtcaccgcagtaatattgttgattatttctgacatcgacgcattatatagttttttaattccatatcttttagaaaagttaaacatccttatacaatttgtgaaattaatattatgaatcatagtttttacacatagatctactacaggcggaacatcaattattatggcagcaactagtatcatttctacattgtttatggtgatgtttatcttcttccagcgcatatagtctaatagcgattcaaacgcgtgatagtttataccattcaatataatcgcttcatcctttagatggtgatcctgaatgcgtttaaaaaaattatacggagacgccgtaataatttccttattcacttgtataatttccccattgatagaaaatattacgctttccattcttaaagtactataagtaattatagtataatgtaaacgtttatatattcaatatttttataaaaatcattttgacattaattcctttttaaatttccgtctatcatctatagaaacgtattctatgaatttataaaatgcttttacgtgtcctatcgtaggcgatagaaccgctaaaaagcctatcgaatttctacaaaagaatctgttatatggtatagggagagtataaaacattaaatgtccgtacttattaaagtattcagtagccaatcctaactctttcgaatacttattaatggctcttgttctgtacgaatctatttttttgaacaacggacctagtggtatatcttgttctatgtatctaaaataatgtctgactagatccgttagtttaatatccgcagtcatcttgtctagaatggcaaatctaactgcgggtttaggctttagtttagtttctatatctacatctatgtctttatctaacaccaaaaatataatagctaatattttattacaatcatccggatattcttctacgatctcactaactaatgtttctttggttatactagtatagtcactatcggacaaataaagaaaatcagatgatcgatgaataatacatttaaattcatcatctgtaagatttttgagatgtctcattagaatattattagggttagtactcattatcattcggcagctattacttattttattatttttcaccatatagatcaatcattagatcatcaaaatatgtttcaatcatcctaaagagtatggtgaatgactcttcccatctaatttctgaacgttcaccaatgtctctagccactttggcactaatagcgatcattcgcttagcgtcttctatattattaactggttgatttaatctatctagcaatggaccgtcggacagcgtcattctcatgttcttaatcaatgtacatacatcgccgtcatctaccaattcatccaacaacataagctttttaaaatcatcattataataggtttgatcgttgtcatttctccaaagaatatatctaataagtagagtcctcatgcttagttaacaactattttttatgttaaatcaattagtacaccgctatgtttaatacttattcatattttagtttttaggattgagaatcaatacaaaaattaatgcatcattaattttagaaatacttagtttccacgtagtcaatgaaacatttgaactcatcgtacaggacgttctcgtacaggacgtaactataaaccggtttatatttgttcaagatagatacaaatccgataactttttttacgaattctacgggatccactttaaaagtgtcataccgggttctttttatttttttaaacagatcaatggtgtgatgttgattaggtcttttacgaatttgatatagaatagcgtttacatattctccataatggtcaatcgccatttgttcgtatgtcataaattctttaattatatgacactgtgtattatttagttcatccttgttcattgttaggaatctatccaaaatggcaattatactagaactataggtgcgttgtatacacatattgatgtgtctgtttatacaatccatgatatttggatccatgctactaccttcgggtaaaattgtagcatcatataccatttctagtactttaggttcattattatccattgcagaggacgtcatgatcgaatcataaaaaaatatattatttttatgttattttgttaaaaataatcatcgaatacttcgtaagatactccttcatgaacataatcagttacaaaacgtttatatgaagtaaagtatctacgatttttacaaaagtccggatgcataagtacaaagtacgcgataaacggaataataatagatttatctagtctatctttttctatagctttcatagttagatacatggtctcagaagtaggattatgtaacatcagcttcgataaaatgactgggttatttagtcttacacattcgctcatacatgtatgaccgttaactacagagtctacactaaaatgattgaacaatagatagtctaccattgtttcgtattcagatagtacagcgtagtacatggcatcttcacaaattatatcattgtctaatagatatttgacgcatcttatggatcccacttcaacagccatcttaaaatcatattgctttcctttatcattaataatttctagaacatcatctctatcataaaagatacaaatattaactgtttgatccgtaataacattgctagtcaatagcaatttgttaataagatgcgctgggctcaatgtcttaataagaagtgtaagaggactatctccgaatttgttttgtttattaacatccgttgatggaagtaaaagatctataatgtctacattcttgactgttttagagcatacaatatggagaggtgtatttccatcatgatctggttttgagggactaattcctagtttcatcatccatgagattgtagaagcttttggattgtctgacataagatgtctatgaatatgatttttgccaaatttatccactatcctggcttcgaatccgatggacattatttttttaaacactctttctgaaggatctgtacacgccaacaacggaccacatccttcttcatcaaccgagttgttaatcttggctccatactgtaccaataaatttattctctctatgacttcatcatctgttcccgagagataatatagaggtgttttatgctgtttatcacacgcgtttggatctgcgccgtgcgtcagcagcatcgcgactattctattattattaattttagaagctatatgcaatggataatttccatcatcatccgtctcatttggagagtatcctctatgaagaagttcttcgacaaatcgttcatctagtcctttaattccacaatacgcatgtagaatgtgataattatttccagaaggttcgatagcttgtagcatattcctaaatacatctaaatttttactattatatttggcataaagagatagataatactcggccgacataatgttgtccattgtagtataaaaattaatatttctatttctatttctgtatatttgcaacaatttactctctataacaaatatcataacttagtttttttatgtcaagaaggcactggtttagttcatctataaatgtcacgccataactaccacgcatgccatactcagaattatgataaagatatttatccttggggtgtaggtaatggggattaatctttgttggatcagtctctaagttaacacatgtcacacatgatccatttatagttatatcacacgatgatgatttatgaattgattccggaagatcgctatcgtattttgtggttccacaattcatttccatacatgttattgtcacactaatattatgatgaactttatctagccgctgagtggtaaacaacagaacagatagtttattatctttaccaacaccctcagccgctgccacaaatctctgatccgtatccatgatggtcatgtttatttctagtccgtatccagtcaacactatgttagcatttctgtcgatatagctttcactcatatgacactcaccaataatagtagaattaatgtcgtaatttacaccaatagtgagttcggcggcaaagtaccaataccggtaatcttgtcgaggaggacatatagtattcttgtattctaccgaatacccgagagatgcgatacaaaagagcaagactaatttgtaaaccatcttactcaaaatatgtaacaatagtacgatgcaatgagtaagacaataggaaatctatcttatatacacataattattctatcaattttaccaattagttagtgtaatgttaacaaaaatgtgggagaatctaattagtttttctttacacaattgacgtacatgagtctgagttccttgtttttgctaattatttcatccaatttattattcttgacgatatcgagatcttttgtataggagtcaaacttgtattcaacatgcttttctataatcattttagctatttcggcatcatccaatagtacattttccagattagcagaatagatattaatgtcgtatttgaacagagcctgtaacatctcaatgtctttattatctatagccaatttaatgtccggaatgaagagaagggaattattggtgtttgtcgacgtcatatagtcgagcaagagaatcatcatatccacgtgtccattttttatagtgatgtgaatacaactaaggagaatagccagatcaaaagtagatggtatctctgaaagaaagtaggaaacaatacttacatcattaagcatgacggcatgataaaatgaagttttccatccagttttcccatagaacatcagtctccaatttttcttaacaaacagttttaccgtttgcatgttaccactatcaaccgcataatacaatgcggtgtttcccttgtcatcaaattgtgaatcatccagtccactgaatagcaaaatctttactattttggtatcttccaatgtggctgcctgatgtaatggaaattcattctctagaagatttttcaatgctccagcgttcaacaacgtacatactagacgcacgttattatcagctattgcataatacaaggcactatgtccatggacatccgccttaaatgtatctttactagagagaaagcttttcagctgcttagacttccaagtattaattcgtgacagatccatgtctgaaacgagacgctaattagtgtatattttttcattttttataattttgtcatattgcaccagaattaataatatctttaatagatctgattagtagatacatggctatcgcaaaacaacatatacacatttaataaaaataatatttattaagaaaattcagatttcacgtacccatcaatataaataaaataatgattccttacaccgtacccatattaaggagattccaccttacccataaacaatataaatccagtaatatcatgtctgatgatgaacacaaatggtgtattaaattccagtttttcaggagatgatctcgccgtagctaccataatagtagatgcctctgctacagttccttgttcgtcgacatctatctttgcattctgaaacattttataaatatataatgggtccctagtcatatgtttaaacgacgcattatctggattaaacatactaggagccatcatttcggctatcgacttaatatccctcttattttcgatagaaaatttagggagtttaagattgtacactttattccctaattgagacgaccaatagtctaattttgcagccgtgatagaatctgtgaaatgggtcatattatcacctattgccaggtacatactaatattagcatccttatacggaaggcgtaccatgtcatattctttgtcatcgattgtgattgtatttccttgcaatttagtaactacgttcatcatgggaaccgttttcgtaccgtacttattagtaaaactagcattgcgtgttttagtgatatcaaacggatattgccatatacctttaaaatatatagtattaatgattgcccatagagtattattgtcgagcatattagaatctactacattagacataccggatctacgttctactatagaattaattttattaaccgcatctcgtctaaagtttaatctatataggccgaatctatgatattgttgataatacgacggtttaatgcacacagtattatctacgaaactttgataagttagatcagtgtacgtatatttagatgttttcagcttagctaatcctgatattaattctgtaaatgctggacccagatctctttttctcaaatccatagtcttcaataattctattctagtattacctgatgcaggcaatagcgacataaacatagaaaacgaataaccaaacggtgagaagacaatattatcatcttgaatatttttatacgctactataccggcattggtaaatccttgtagacgataggcggacgctgaacacgctaacgatagtatcaataacgcaatcatgattttatggtattaataattaaccttatttttatgttcggtataaaaaaattattgatgtctacacatccttttgtaattgacatctatatatccttttgtataatcaactctaatcactttaacttttacagttttccctaccagtttatccctatattcaacatatctatccatatgcatcttaacactctctgccaagatagcttcagagtgaggatagtcaaaaagataaatatatagagcataatcattctcgtatactctgccctttattacatcacccgcattgggcaacgaataacaaaatgcaagcatcttgttaacgggctcgtaaattgggataaaaattatgtttttattgtcttatatctattttattcaagagaatattcaggaatttctttttccggttgtatctcgtcgcagtatatatcatttgtacattgtttcatattttttaatagtttacaccttttagtaggactagtatcgtacaattcatagctgtattttgaattccaatcacgcataaaaatatcttccaattgttgacgaagacctaatccatcatccggtgtaatattaatagatgctccacatgtatccgtaaagtaatttcctgtccaatttgaggtacctatataggccgttttatcggttaccatatatttggcatggtttaccctagaatacggaatgggaggatcagcatctggtacaataaatagctttacttctatatttatgtttttagattttagcatagcgatagatcttaaaaagtttctcatgataaacgaagatcgttgccagcaactaatcaatagcttaacggatacttgtctgtctatagcggatcttcttaattcatcttctatataaggccaaaacaaaattttacccgccttcgaataaataatagggataaagttcataacagatacataaacgaatttactcgcatttctaatacatgacaataaagcggttaaatcattggttctttccatagtacatagttgttgcggtgcagaagcaataaatacagagtgtggaacgccgcttacgttaatactaagaggatgatctgtattataatacgacggataaaagtttttccaattatatggtagattgttaactccaagataccagtatacctcaaaaatttgagtgagatccgctgccaagttcctattattgaagatcgcaatacccaattccttgacctgagttagtgatctccaatccatgttagcgcttcctaaataaatatgtgtattatcagatatccaaaattttgtatgaagaactcctcctaggatatttgtaatatctatgtatcgtacttcaactccggccatttgtagtctttcaacatcctttaatggtttgttagatttattaacggctactctaactcgtactcctcttttgggtaattgtacaatctcgtttaatattatcgtgccgaaattcgtacccacttcatccgataaactccaataaaaagatgatatatctagtgtttttgtggtattggatagaatttccctccacatgttaaatgtagacaaatatactttatcaaattgcatacctataggaatagtttctgtaatcactgcgattgtattatccggattcattttatttgttaaaagaataatcctatatcacttcactctattaaaaatccaagtttctatttctttcatgactgattttttaacttcatccgtttccttatgaagatgatgtttggcaccttcataaatttttatttctctattacaatttgcatgttgcatgaaataatatgcacctaaaacatcgctaatcttattgtttgttccctggagtatgagagtcggggggtgttaatcttggaaattatttttctaaccttgttggtagccttcaagacctgactagcaaatccagccttaattttttcatgattgactaatgggtcgtattggtatttataaactttatccatatctctagatactgattctggacatagctttccgactggcgcatttggtgtgatggttcccataagtttggcagctagcagattcagtcttgaaacagcatctgcattaactagaggagacattagaatcattgctgtaaacaagtttggattatcgtaagaggctagctcccatggaatgacccaataagtagatttaatagttaccacgtgctgtaccaaagtcatcaatcatcattttttcaccattacttcttccatgtccaatatgatcatgtgagaatactaaaattcctaacgatgatatgttttcagctagttcgtcataacgtccagaatgtttaccagctccatgacttatgaatactaatgccttaggatatgtaataggtttccaatatttacaatatatgtaatcattgtccagattgaacatacagtttgcactcatgattcacgttatataactatcaatattaacagttcgtttgatgatcatattatttttatgttttattgataattgtaaaaacatacaattaaatcaatatagaggaaggagacggctactgtcttttgtaagatagtcatggcgactaaattagattatgaggatgctgttttttactttgtggatgatgataaaatatgtagtcgcgactccatcatcgatctaatagatgaatatattacgtggagaaatcatgttatagtgtttaacaaagatattaccagttgtggaagactgtacaaggaattgatgaagttcgatgatgtcgctatacggtactatggtattgataaaattaatgagattgtcgaagctatgagcgaaggagaccactacatcaattttacaaaagtccatgatcaggaaagtttattcgctaccataggaatatgtgctaaaatcactgaacattggggatacaaaaagatttcagaatctagattccaatcattgggaaacattacagatttgatgaccgacgataatataaacatcttgatactttttctagaaaaaaaattgaattgatgatataggggtcttcataacgcataattattacgttagcattctatatccgtgttaaaaaaaattatcctatcatgtatttgagagttttatatgtagcaaacatgatagctgtgatgccaataagctttagatattcacgcgtgctagtgttagggatggtattatctggtggtgaaatgtccgttatataatctacaaaacaatcatcgcatatagtatgcgatagtagagtaaacatttttatagtttttactggattcatacatcgtctacccaattcggttataaatgaaattgtcgccaatcttacacccaaccccttgttatccattagcatagtattaacttcgttatttatgtcataaactgtaaatgattttgtagatgccatatcatacatgatattcatgtccctattataatcattactaactttatcacaatatatgttgataatatctatatatgatctagtctttgtgggcaactgtctatacaagtcgtctaaacgttgtttactcatatagtatcgaacagccatcattacatggtcccgttccgttgatagataatcgagtatgttagtggacttgtcaaatctatataccatattttctggaagtggatatacatagtcgtgatcaacattattgctagcctcatcttctatatcctgtactataccattatctatatcatctacataatctatgatattattacacataaacatcgacaacatactattgtttattatctaagtcctgttgatccaaacccttgatctcctctatttgtactatctagagattgtacttcttccagttctggataatatatacgttgatagattagctgagctattctatctccagtatttacattaaacgtacattttccattattaataagaatgactcctatgtttcccctataatcttcgtctattacaccacctcctatatcaatgccttttagtgacagaccagacctaggagctattctaccatagcagaacttaggcatggacatactaatatctgtcttaattaactgtctttctcctggagggatagtataatcgtaagcgctatacaaatcatatccggcagcacccggcgattgcctagtaggagatttagctctgttagtttccttaacaaatctaactggtgagttaatattcatgttgaacataaaactaatattttatttcaaaattatttaccatcccatatattccatgaataagtgtgatgattgtacacttctatagtatctatatacgatccacgataaaatcctcctatcaatagcagtttattatccactatgatcaattctggattatccctcggataaataggatcatctatcagagtccatgtattgctggattcacaataaaattccgcatttctaccaaccaagaataaccttctaccgaacactaacgcgcatgatttataatgaggataataagtggatggtccaaactgccactgatcatgattgggtagcaaatattctgtagttgtatcagtttcagaatgtcctcccattacgtatataacattgtttatggatgccactgctggattacatctaggtttcagaagactcggcatattaacccaagcagcatccccgtggaaccaacgctcaacagatgtgggatttggtagacctcctactacgtataatttattgttagcgggtatcccgctagcatacagtctggggctattcatcggaggaattggaatccaattgtttgatatataatttacagctatagcattgttatgtatttcattgttcatccatccaccgatgagatatactacttctccaacatgagtacttgtacacatatggaatatatctataatttgatccatgttcataggatactctatgaatggatacttgtatgatttgcgtggttgtttatcacaatgaaatattttggtacagtctagtatccattttacattatttatacctctgggagaaagataatttgacctgattacatttttgataaggagtagcagatttcctaatttatttcttcgcctcatataccacttaatgacaaaatcaactacataatcctcatctggaacatttagttcatcgctttctagaataagtttcatagatagataatcaaaattgtctatgatgtcatcttccagttccaaaaagtgtttggcaataaagtttttagtatgacataagagattggatagtccgtattctatacccatcatgtaacactcgacacaatattcctttctaaaatctcgtaagataaagtttatacaagtgtagatgataaattctacagaggttaatatagaagcacgtaataaattgacgacgttatgactatctatatatacctttccagtatatgagtaaataactatagaagttaaactgtgaatgtcaaggtctagacaaacccttgtaactggatctttatttttcgtgtatttttgacgtaaatgtgtgcgaaagtaaggagataactttttcaatatcgtagaattgactattatattgcctcctatggcatcaataattgttttgaatttcttagtcatagacaatgctaatatattcttacagtacacagtattgacaaatatcggcatttatgtttctttaaaagtcaacatctagagaaaaatgattatctttttgagacataactcccattttttggtattcacccacacgtttttcgaaaaaattagtttttccttccaatgatatattttccatgaaatcaaacggattggtaacattataaatttttttaaatcccaattcagaaatcaatctatccgcgacgaattctatatatgttttcatcatttcacaattcattcctataagtttaactggaagagccgcagtaagaaattcttgttcaatggatactgcatctgttataatagatctaacggtttcttcactcggtggatgcaataaatgtttaaacatcaaacatgcgaaatcgcagtgcagaccctcgtctctactaattagttcgttggaaaacgtgagtccgggcattaggccacgctttttaagccaaaatatggaagcgaatgatccagaaaagaaaattccttctactgcagcaaaggcaataagtctctctccataaccggcgctgtcatgtatccacttttgagcccaatcggccttcttttttacacaaggcatcgtttctatggcattaaagagatagtttttttcattactatctttaacataagtatcgatcaaaagactatacatttccgaatgaatgttttcaatggccatctgaaatccgtagaaacatctagcctcggtaatctgtacttctgtacaaaatcgttccgccaaattttcattcactattccgtcactggctgcaaaaaacgccaatacatgttttataaaatatttttcgtctggtgttagtttattccaatcattgatatctttagatatatctacttcttccactgtccaaaatgatgcctctgcctttttatacatgttccagatgtcatgatattggattgggaaaataacaaatctatttggatttggtgcaaggatgggttccataactaaattaacaataacaataaattttttttcagttatctatatgcctgtacttggattttttgtacatcgatatcgccgcaatcactacaataattacaagtattattgatagcattgttattagtactatcataattaaattatctacattcatgggtgctgaataatcgttattatcatcattatcattttgtaattgtgacatcatactagataaatcgtttgcgagattgttgtgggaagcgggcatggaggatgcattatcattattatttaacgccttccatttggattcacaaatgttacgcacattcaacattttatggaaactataattttgtgaaaacaaataacaagaaaactcgtcatcgttcaaatttttaacgatagtaaaccgattaaacgtcgagctaatttctaacgctagcgactctgttggatatgggtttccagatatatatcttttcagttcccctacgtatctataatcatctgtaggaaatggaagatatttccatttatctactgttcctaatatcatatgtggtggtgtagtagaaccattaagcgcgaaagatgttatttcgcatcgtattttaacttcgcaataatttctggttagataacgcactctaccagtcaagtcaatgatattagcctttacagatatattcatagtagtcgtaacgatgactccatcttttagatgcgatactcctttgtatgtaccagaatcttcgtacctcaaactcgatatatttaaacaagttaatgagatattaacgcgttttatgaatgatgatatataaccagaagttttatcctcggtggctagcgctataaccttatcattataataccaactagtgtgattaatatgtgacacgtcagtgtgggtacaaatatgtacattatcgtctacgtcgtattcgatacatccgcatacagccaacaaatataaaatgacaaatactctaacgccgttcgtacccatcttgatgcggtttaataaatgttttgatttcaatttattgtaaaaaaagattcggttttatactgttcgatattctcattgcttatattttcatctatcatctccacacagtcaaatccgtggttagcatgcacctcatcaaccggtaaaagactatcggactcttctatcattataactctagaatatttaatttggtcattattaatcaagtcaattatcttatttttaacaaacgtgagtattttactcattttttataaaaacttttagaaatatacagactctatcgtgtgtctatatcttctttttatatccaatgtatttatgtctgatttttcttcatttatcatatataatggtccaaattctacacgtgcttcggattcatccagatcattaaggttcttataattgtaacatccttctcttccctcttctacatcttccttcttattcttattcttagcgtcacagaatctaccacagcaggatcccatgacgagcgtcatattaaactaatccattttcaattataatatatgattagtaatgaccattaaaataaaaaatattcttcataaccggcaagaaagtgaaaagttcacattgaaactatgtcagtagtatacatcatgaaatgatgatatatatatactctattttggtggaggattatatgatataattcgtggataatcatttttaagacacatttctttattcgtaaatcttttcacgttaaatgagtgtccatattttgcaatttcttcatatgatggcggtgtacgtggacgaggctgctcctgttcttgttgtggtcgccgactgtcgtgtctgcgtttagatccctccattatcgcgattgcgtagatggagtactattttataccttgtaattaaatttttttattaattaaacgtataaaaacgttccgtatctgtatttaagagccagatttcgtctaatagaacaaatagctacagtaaaaataactagaataattgctacacccactagaaaccacggatcgtaatacggcaatcggttttcgataataggtggaacgtatattttatttaaggacttaacaattgtctgtaaaccacaatttgcttccgcggatcctgtattaactatctgtaaaagcatatgttgaccgggcggagccgaacattctccgatatctaatttctgtatatctataatattattaacctccgcatacgcattacagttcttttctagcttggataccgcactaggtacatcgtctagatctattcctatttcctcagcgatagctcttctatccttttccggaagcaatgaaatcacttcaataaatgattcaaccatgagtgtgaaactaagtcgagaattactcatgcatttgttagttattcggagcgcgcaatttttaaactgtcctataacctctcctatatgaatagcacaagtgacattagtagggatagaatgttgagctaatttttgtaaataactatctataaaaagattatacaaagttttaaactctttagtttccgccatttatccagtctgagaaaatgtctctcataataaatttttccaagaaactaattgggtgaagaatggaaacctttaatctatatttatcacagtctgttttggtacacatgatgaattcttccaatgccgtactaaattcgatatctttttcgatttctggatatgtttttaataaagtatgaacaaagaaatggaaatcgtaataccagttatgtttaactttgaaattgttttttattttcttgttaatgattccagccacttgggaaaagtcaaagtcgtttaatgccgatttaatacgttcattaaaaacaaactttttatcctttagatgaattattattggttcattggaatcaaaaagtaagatattatcgggtttaagatctgcgtgtaaaaagttgtcgcaacagggtagttcgtagattttaatgtataacagagccatctgtaaaaagataaactttatgtattgtaccaaagatttaaatcctaatttgatagctaactcggtatctactttatctgccgaatacagtgctaggggaaaaattataatgtttcctctttcatattcgtagttagttctcttttcatgttcgaaaaagtgaaacatgcggttaaaatagtttataacattaatattactgttaataactgccggataaaagtgggatagtaatttcacgaatttgatactgtcctttctctcgttaaacgcctttaaaaaaactttagaagaatatctcaatgagagttcctgaccatccatagtttgtatcaataatagcaacatatgaagaacacgtttatacagagtatgtaaaaatgttaatttatagtttaatcccatggcccacgcacacacgattaattttttttcatctccctttagattgttgtatagaaatttgggtactgtgaactccgccgtagtttccatgggactatataattttgtggcctcgaatacaaattttactacatagttatctatcttaaagactataccatatcctcctgtagatatgtgataaaaatcgtcgtttataggataaaatcgtttatccttttgttggaaaaaggatgaattaatgtaatcattctcttctatctttagtagtgtttccttattaaaattcttaaaataatttaacaatctaactgacggagcccaattttggtgtaaatctaattgggacattatattgttaaaatacaaacagtctcctaatataacagtatctgataatctatggggagacatccattgatattcaggggatgaatcattggcaacacccatttattgtacaaaaagccccaatttacaaacgaaagtccaggtttgatagagacaaacaattaactattttgtctctgtttttaacacctccacagtttttaatttctttagtaatgaaattattcacaatatcagtatcttctttatctaccagagattttactaacttgataaccttggctgtctcattcaatagggtagtaatatttgtatgtgtgatattgatatctttttgaattgtttcttttagaagtgattctttgatggtgccagcatacgaattacaataatgcagaaactcggttaacatgcaggaattatagtaagccaattccaattgttgcctgtgttgtattagagtgtcaatatgagcaatggtgtccttgcgtttctctgatagaatgcgagcagcgattttggcgttatcatttgacgatatttctggaatgacgaatcctgtttctactaactttttggtaggacaaagtgaaacaatcaagaagatagcttctcctcctatttgtggaagaaattgaactcctctagatgatctactgacgatagtatctccttgacagatattggaccgaattacagaagtacctggaatgtaaagccctgaaaccccctcattttttaagcagattgttgccgtaaatcctgcactatgcccaagatagagagctcctttggtgaatccatctctatgtttcagtttaaccaagaaacagtcagctggtctaaaatttccatctctatctaatacagcatctaacttgatgtcaggaactatgaccggtttaatgttatatgtaacattgagtaaatccttaagttcataatcatcactgtcatcagttatgtacgatccaaacaatgtttctaccggcatagtggatacgaagatgctatccatcagaatgtttccctgattagtattttctatatagctattcttctttaaacgattttccaaatcagtaactatgttcatttttttaggagtaggacgcctagccagtatggaagaggattttctagatcctctcttcaacatctttgatctcgatggaatgcaaaaccccatagtgaaacaaccaacgataaaaataatattgtttttcactttttataattttaccatctgactcatggattcattaatatctttataagagctactaacgtataattctttataactgaactgagatatatacaccggatctatggtttccataattgagtaaatgaatgctcggcaataactaatggcaaatgtatagaacaacgaaattatactagagttgttaaagttaatattttctatgagctgttccaataaattatttgttgtgactgcgttcaagtcataaatcatcttgatactatccagtaaaccgtttttaagttctggaatattatcatcccattgtaaagcccctaattcgactatcgaatatcctgctctgatagcagtttcaatatcgacggacgtcaatactgtaataaaggtggtagtattgtcatcatcgtgataaactacgggaatatggtcgttagtaggtacggtaactttacacaacgcgatatataactttccttttgtaccatttttaacgtagttgggacgtcctgcagggtattgttttgaagaaatgatatcgagaacagatttgatacgatatttgttggattcctgattattcactataatataatctagacagatagatgattcgataaatagagaaggtatatcgttggtaggataatacatccccattccagtattctcggatactctattgatgacactagttaagaacatgtcttctattctagaaaacgaaaacatcctacatggactcattaaaacttctaacgctcctgattgtgtctcgaatgcctcgtacaaggatttcaaggatgccatagattctttgaccaacgatttagaattgcgtttagcatctgatttttttattaaatcgaatggtcggctctctggtttgctaccccaatgataacaatagtcttgtaaagataaaccgcaagaaaatttatacgcatccatccaaataaccctagcaccatcggatgatattaatgtattattatagattttccatccacaattattgggccagtatactgttagcaacggtatatcgaatagattactcatgtaacctactagaatgatagttcgtgtactagtcataatatctttaatccaatctaaaaaatttaaaattagattttttacactgttaaagttaacaaaagtattacccgggtacgtggatatcatatatggcattggtccattatcagtaatagctccataaactgatacggcgatggtttttatatgtgtttgatctaacgaggaagaaattcgcgcccacaattcatctctagatatgtatttaatatcaaacggtaacacatcaatttcgggacgcgtatatgtttctaaatttttaatccaaatataatgatgacctatatgccctattatcatactgtcaactatagtacacctagggaacttacgatacatctgtttcctataatcgttaaattttacaaatctataacatgctaaaccttttgacgacagccattcattaatttctgatatggaatctgtattctcgataccgtatcgttctaaagccagtgctatatctccctgttcgtgggaacgctttcgtataatatcgatcaacggataatctgaagtttttggagaataatatgactcatgatctatttcgtccataaacaatctagacataggaattggaggcgatgatcttaattttgtgcaatgagtcgtcaatcctataacttctaatcttgtaatattcatcatcgacataatactatctatgttatcatcgtatattagtataccatgaccttcttcatttcgtgccaaaatgatatacagtcttaaatagttacgcaatatctcaatagtttcataattgttagctgttttcatcaaggtttgtatcctgtttaacatgatggcgttctataacgtctctattttctatttttaattttttaaatttttaacgatttactgtggctagatacccaatctctctcaaatatttttttagcctcgcttacaagctgtttatctatactattaaaactgacgaatccgtgattttggtaatgggttccgtcgaaatttgccgaagtgatatgaacatattcgtcgtcgactatcaacaattttgtattattctgaatagtgaaaaccttcacagatagatcattttgaacacacaacgcatctagacttttggcggttgccatagaatatacgtcgttcttatcccaattaccaactagaagtctgatcttaactcctctattaatggctgcttctataatggagttgtaaatgtcgggccaatagtagctattaccgtcgacacgtgtagtgggaactatggccaaatgttcaatatctatactagtcttagctgacctgagtttatcaataactacatcggtatctagatctctagaatatcccaataggtgttccggagaatcagtaaagaacactccacctataggattcttaatatgatacgcagtgctaactggcaaacaacaagccgcagagcataaattcaaccatgaattttttgcgctattaaaggctttaaaagtatcaaatcttctacgaagatctgtggccagcgggggataatcagaatatacacctaacgttttaatcgtatgtatagatcctccagtaaatgacgcgtttcctacataacatctttcatcatctgacacccaaaaacaaccgagtagtagtcccacattattttttttatctatattaacggttataaaatttatatccgggcagtgactttgtagctctcccagatttcttttccctcgttcatctagcaaaactattattttaatccctttttcagatgcctcttttagtttatcaaaaataagcgctcccctagtcgtactcagaggattacaacaaaaagatgctatgtatatatatttcttagctagagtgataatttcgttaaaacattcaaatgttgttaaatgatcggatctaaaatccatattttctggtagtgtttctaccagcctacattttgctcccgcaggtaccgatgcaaatggccacatttagttaacataaaaacttatacatcctgttctatcaacgattctagaatatcatcggctatatcgctaaaattttcatcaaagtcgacatcacaacctaactcagtcaatatattaagaagttccatgatgtcatcttcgtctatttctatatccgtatccattgtagattgttgaccgattatcgagtttaaatcattactaatactcaatccttcagaatacaatctgtgtttcattgtaaatttataggcggtgtatttaagttggtagattttcaattatgtattaatatagcaacagtagttcttgctcctccttgattctagcatcctcttcattattttcttctacgtacataaacatgtccaatacgttagacaacacaccgacgatggcggccgcagatctcgagttatgatctacttccttaccgtgcaataaattagaatatattttctacttttacgagaaattaattattgtatttattatttatgggtgaaaaacttactataaaaagcgggtgggtttggaattagtgaaagcttaaaaattgaaattttattttttttttttggaatataaataagctcgaagtcgacagatctaggcctggtaccaggaggaggaattcagcttaaagatgacttcgaaagtttatgatccagaacaaaggaaacggatgataactggtccgcagtggtgggccagatgtaaacaaatgaatgttcttgattcatttattaattattatgattcagaaaaacatgcagaaaatgctgttatttttttacatggtaacgcggcctcttcttatttatggcgacatgttgtgccacatattgagccagtagcgcggtgtattataccagatcttattggtatgggcaaatcaggcaaatctggtaatggttcttataggttacttgatcattacaaatatcttactgcatggtttgaacttcttaatttaccaaagaagatcatttttgtcggccatgattggggtgcttgtttggcatttcattatagctatgagcatcaagataagatcaaagcaatagttcacgctgaaagtgtagtagatgtgattgaatcatgggatgaatggcctgatattgaagaagatattgcgttgatcaaatctgaagaaggagaaaaaatggttttggagaataacttcttcgtggaaaccatgttgccatcaaaaatcatgagaaagttagaaccagaagaatttgcagcatatcttgaaccattcaaagagaaaggtgaagttcgtcgtccaacattatcatggcctcgtgaaatcccgttagtaaaaggtggtaaacctgacgttgtacaaattgttaggaattataatgcttatctacgtgcaagtgatgatttaccaaaaatgtttattgaatcggatccaggattcttttccaatgctattgttgaaggcgccaagaagtttcctaatactgaatttgtcaaagtaaaaggtcttcatttttcgcaagaagatgcacctgatgaaatgggaaaatatatcaaatcgttcgttgagcgagttctcaaaaatgaacaagcggccgccgccaccatgagcaagggcgaggaactgttcactggcgtggtcccaattctcgtggaactggatggcgatgtgaatgggcacaaattttctgtcagcggagagggtgaaggtgatgccacatacggaaagctcaccctgaaattcatctgcaccactggaaagctccctgtgccatggccaacactggtcactaccttcacctatggcgtgcagtgcttttccagatacccagaccatatgaagcagcatgactttttcaagagcgccatgcccgagggctatgtgcaggagagaaccatctttttcaaagatgacgggaactacaagacccgcgctgaagtcaagttcgaaggtgacaccctggtgaatagaatcgagctgaagggcattgactttaaggaggatggaaacattctcggccacaagctggaatacaactataactcccacaatgtgtacatcatggccgacaagcaaaagaatggcatcaaggtcaacttcaagatcagacacaacattgaggatggatccgtgcagctggccgaccattatcaacagaacactccaatcggcgacggccctgtgctcctcccagacaaccattacctgtccacccagtctgccctgtctaaagatcccaacgaaaagagagaccacatggtcctgctggagtttgtgaccgctgctgggatcacacatggcatggacgagctgtacaagtgagcggccgccctgctagcaagcttgctagcggccgctcgagatctgcggccgctacagacacgaatatgactaaaccgatgaccatttaaaaacccctctctagctttcacttaaactgtatcgatcattcttttagcacatgtataatataaaaacattattctatttcgaatttaggcttccaaaaatttttcatccgtaaaccgataataatatatatagacttgttaatagtcggaataaatagattaatgcttaaactatcatcatctccacgattagagatacaatatttacattctttttgctgtttcgaaactttatcaatacacgttaatacaaacccaggaaggagatattgaaactgaggctgttgaaaatgaaacggtgaatacaataattcagataatgtaaaatcatgattccgtattctgatgatattagaactgctaatggatgtcgatggtatgtatctaggagtatctattttaacaaagcatcgatttgctaatatacaattatccttttgattaattgttattttattcatattcttaaaaggtttcatatttatcaattcttctacattaaaaatttccatttttaatttatgtagccccgcaatactcctcattacgtttcattttttgtctataatatccattttgttcatctcggtacatagattatccaattgagaagcgcatttagtagttttgtacattttaagtttattgacgaatcgtcgaaaactagttatagttaacattttattatttgataccctgatattaatacccctgccgttactattatttataactgatgtaatccacgtaacattggaattaactatcgatagtaatgcatcgacgcttccaaaattgtctattataaactcaccgataatttttttattgcatgttttcatattcattaggattatcaaatctttaatcttattacgattgtatgcgttgatattacaagacgtcattctaaaagacggaggatctccatcaaatgccagacaatcacgtacaaagtacatggaaataggttttgttctattgcgcatcatagatttatatagaacacccgtagaaatactaatttgttttactctataaaatactaatgcatctatttcatcgttttgtataacgtctttccaagtgtcaaattccaaatttttttcattgatagtaccaaattcttctatctctttaactacttgcatagataggtaattacagtgatgcctacatgccgttttttgaaactgaatagatgcgtctagaagcgatgctacgctagtcacaatcaccactttcatatttagaatatatatatgtaaaaatatagtagaatttcattttgtttttttctatgctataaatgaattctcattttgcatctgctcatactccgttttatattaataccaaagaaggaagatatctggttctaaaagccgttaaagtatgcgatgttagaactgtagaatgcgaaggaagtaaagcttcctgcgtactcaaagtagataaaccctcatcgcccgcgtgtgagagaagaccttcgtccccgtccagatgcgagagaatgaataaccctggaaaacaagttccgtttatgaggacggacatgctacaaaatatgttcgcggctaatcgcgataatgtagcttctagacttttgtcctaaaatactattatatccttttcgatattaataaatccgtgtcgtccaggttttttatctctttcagtatgtgaatagataggtattttatctctattcatcatcgaatttaagagatccgataaacattgtttgtattctccagatgtcagcatctgatacaacaatatatgtgcacataaacctctggcacttatttcatgtaccttccccttatcactaaggagaatagtatttgagaaatatgtatacatgatattatcatgaattagatatacagaatttgtaacactctcgaaatcacacgatgtgtcggcgttaagatctaatatatcactcgataacacattttcatctagatacactagacattttttaaagctaaaatagtctttagtagtaacagtaactatgcgattattttcatcgatgatacatttcatcggcatattattacgcttaccatcaaagactataccatgtgtatatctaacgtattctagcatggttgccatacgcgcattaaacttttcaggatctttggatagatcttccaatctatctatttgagaaaacatttttatcatgttcaatagttgaaacgtcggatccactatatagatattatctataaagattttaggaactacgttcatggtatcctggcgaatattaaaactatcaatgatatgattatcgttttcatcttttatcaccatatagtttctaagatatgggattttacttaatataatattatttcccgtgataaattttattagaaaggccaaatctataagaaaagtcctagaattagtctgaagaatatctatatcgccgtatagtatatttggattaattagatatagagaatatgatccgtaacatatacaacttttattatggcgtctaagatattcttccatcaacttattaacatttttgactagggaagatacattatgacgtcccattacttttgccttgtctattactgcgacgttcatagaatttagcatatctcttgccaattcttccattgatgttacattataagaaattttagatgaaattacatttggagctttaatagtaagaactcctaatatgtccgtgtatgtggtcactaatacagattgtagttctataatcgtaaataatttacctatattatatgtttgagtctgtttagaaaagtagctaagtatacgatcttttatttctgatgcagatgtattaacatcggaaaaaaatctttttttattcttttttactaaagatacaaatatgtctttgttaaaaacagttattttctgaatatttctagcttgtaattttaacatatgatattcgttcacactaggtactctgcctaaataggtttctataatctttaatgtaatattaggaaaagtattctgatcaggattcctattcattttgaggatttaaaactctgattattgtctaatatggtctctacgcaaactttttcacagagcgatagagtttttgataactcgtttttcttaagaaatataaaactactgtctccagagctcgctctatcttttattttatctaattcgatacaaactcctgatactggttcagaaagtaattcattaattttcagtcctttatagaagatatttaatatagataatacaaaatcttcagtttttgatatcgatctgattgatcctagaactagatatattaataacgtgctcattaggcagtttatggcagcttgataattagatatagtatattccagttcatatttattagataccgcattgcccagattttgatattctatgaattcctctgaaaataaatccaaaataactagacattctattttttgtggattagtgtactctcttccctctatcatgttcactactggtgtccacgatgataaatatctagagggaatataatatagtccataggatgccaatctagcaatgtcgaataactgtaattttattcttcgctcttcattatgaattgattcttgaggtataaacctaacacaaattatattattagacttttcgtatgtaatgtctttcatgttataagtttttaatcctggaatagaatctattttaatgaggcttttaaacgcagagttctccaacgagtcaaagcataatactctgttgtttttcttatatacgatgttacgattttcttctttgaatggaataggtttttgaattagtttataattacaacataatagataaggaagtgtgcaaatagtacgcggaaaaaacataatagctcccctgttttcatccatggttttaagtaaatgatcactggcttctttagtcaatggatattcgaacattaaccgtttcatcatcattggacagaatccatatttcttaatgtaaagagtgatcaaatcattgtgtttattgtaccatcttgttgtaaatgtgtattcggttatcggatctgctcctttttctattaaagtatcgatgtcaatctcgtctaagaattcaactatatcgacatatttcatttgtatacacataaccattactaacgtagaatgtataggaagagatgtaacgggaacagggtttgttgattcgcaaactattctaatacataattcttctgttaatacgtcttgcacgtaatctattatagatgccaagatatctatataattattttgtaagatgatgttaactatgtgatctatataagtagtgtaataattcatgtattttgatatatgttccaactctgtctttgtgatgtctagtttcgtaatatctatagcatcctcaaaaaatatattcgcatatattcccaagtcttcagttctatcttctaaaaaatcttcaacgtatggaatataataatctattttacctcttctgatatcattaatgatatagtttttgacactatcttctgtcaattgattcttattcactatatctaagaaacggatagcgtccctaggacgaactactgccattaatatctctattatagcttctggacataattcatctattataccagaattaatgggaactattccgtatctatctaacatagttttaagaaagtcagaatctaagacttgatgttcatatattggttcatacatgaaatgatctctattgatgatagtgactatttcattctctgaaaattggtaactcattctatatatgctttccttgttgatgaaggatagaatatactcaatagaatttgtaccaacaaactgttctcttatgaatcgtatatcatcatctgaaataatcatgtaaggcatacatttaacaattagagacttgtctcctgttatcaatatactattcttgtgataatttatgtgtgaggcaaatttgtccacgttctttaattttgttatagtagatatcaaatccaatggagctacagttcttggcttaaacagatatagtttttctggaacaaattctacaacattattataaaggactttgggtagataagtgggatgaaatcctattttaattaatgcgatagccttgtcctcgtgcagatatccaaacgcttttgtgatagtatggcattcattgtctagaaacgctctacgaatatctgtgacagatatcatctttagagaatatactagtcgcgttaatagtactacaatttgtattttttaatctatctcaataaaaaaattaatatgtatgattcaatgtataactaaactactaactgttattgataactagaatcagaatctaatgatgacgtaaccaagaagtttatctactgccaatttagctgcattatttttagcatctcgtttagattttccatcggccttatcgaatactcttccgtcgatgtctacacaggcataaaatgtaggagagttactaggcccaactgattcaatacgaaaagaccaatctctcctagtaatttggcagtactcattaataacggtgacagggttagcatctttccaatcaataatttttttagccggaataacatcatcaaaagacttatgatcctctctcattgatttttcgcgggatacatcatctattatgacgtcagccatagcatcagcatccggcttatccgcctccgttgtcataaaccaacgaggaggaatatcgtcggagctgtacaccatagcactacgttgaagatcgtacagagctttattaacttctcgcttctccatattaagttgtctagttagttgtgcagcagtagctccttcgattccaatgtttttaatagccgcacacacaatctctgcgtcagaacgctcgtcaatatagatcttagacatttttagagagaactaacgcaaccagcaataaaactgaacctactttatcatttttttattcatcatcctctggtggttcgtcgttcctatcaaatgtagctctgattaacccgtcatctataggtgatgctggttctggagattctggaggagatggattattatctggaagaatctctgttatttccttgttttcatgtatcgattgcgttgtaacattaagattgcgaaatgctctaaatttgggaggcttaaagtgttgtttgcaatctctacacgcgtgtctaactagtggaggttcgtcagctgctctagtttgaatcatcatcggcgtagtattcctacttttacagttaggacacggtgtattgtatttctcgtcgagaacgttaaaataatcgttgtaactcacatcctttattttatctatattgtattctactcctttcttaatgcattttataccgaataagagatagcgaaggaattctttttcggtgccgctagtacccttaatcatatcacatagtgttttatattccaaatttgtggcaatagacggtttatttctatacgatagtttgtttctggaatcctttgagtattctataccaatattattctttgattcgaatttagtttcttcgatattagattttgtattacctatattcttgatgtagtactttgatgatttttccatggcccattctattaagtcttccaagttggcatcatccacatattgtgatagtaattctcggatatcagtagcggctaccgccattgatgtttgttcattggatgagtaactactaatgtatacattttccatttataacacttatgtattaactttgttcatttatattttttcattattatgttgatattaacaaaagtgaatatatatatgttaataattgtattgtggttatacggctacaattttataatgagtgaaagtcagtgtccgatgatcaatgacgatagctttactctgaaaagaaagtatcaaatcgatagtgcggagtcaacaataaaaatggataagaagaggataaagtttcagaatagagccaaaatggtaaaagaaataaatcagacaataagagcagcacaaactcattacgagacattgaaactaggatacataaaatttaagagaatgattatgactactactctagaagatatagcaccatctattccaaataatcagaaaacttataaactattctcggacatttcagccatcggcaaagcatcacagaatccgagtaagatggtatatgctctgctgctttacatgtttcccaatttgtttggagatgatcatagattcattcgttatagaatgcatccaatgagtaaaatcaaacacaagatcttctctcctttcaaacttaatcttattagaatattagtggaagaaagattctataataatgaatgcagatctaataaatggagaataattggaacacaagttgataaaatgttgatagctgaatctgataaatatacaatagatgcaaggtataacctaaaacccatgtatagaatcaagggagaatctgaagaagataccctctttatcaaacagatggtagaacaatgtgtgacatcccaggaattggtggaaaaagtgttgaagatactgtttagagatttgttcaagagtggagaatacaaagcgtacagatacgatgatgatgtagaaaatggatttattggattggatacactaaaattaaacattgttcatgatatagttgaaccatgtatgcctgttcgtaggccagtggctaagatactgtgtaaagaaatggtaaataaatactttgagaatccgctacatattattggtaaaaatcttcaagagtgcattgactttgttagtgaataggcatttcatctttctccaatactaattcaaattgttaaattaataatggatagtataaatagttattagttataagatagtaaaaataattattagaataagagtgtagtatcatagataactctcttctataaaaatggattttattcgtagaaagtatcttatatacacagtagaaaataatatagattttttaaaggatgatacattaagtaaagtaaacaattttaccctcaatcatgtactagctctcaagtatctagttagcaattttcctcaacacgttattactaaggatgtattagctaataccaatttttttgttttcatacatatggtacgatgttgtaaagtgtacgaagcggttttacgacacgcatttgatgcacccacgttgtacgttaaagcattgactaagaattatttatcgtttagtaacgcaatacaatcgtacaaggaaaccgtgcataaactaacacaagatgaaaaatttttagaggttgccgaatacatggacgaattaggagaacttataggcgtaaattatgacttagttcttaatccattatttcacggaggggaacccatcaaagatatggaaatcatttttttaaaactgtttaagaaaacagacttcaaagttgttaaaaaattaagtgttataagattacttatttgggcatacctaagcaagaaagatacaggcatagagtttgcggataatgatagacaaaatatatacactctatttcaacaaactggtagaatcgtccatagcaatctaacagaaacgtttagagattatatctttcccggagataagactagctattgggtgtggttaaacgaaagtatagctaatgatgcggatatcgttcttaatagacacgccattaccatgtatgataaaattcttagttatatatactctgagataaaacaaggacgcgttaataaaaacatgcttaagttagtttatatctttgagcctgaaaaagatatcagagaacttctgctagaaatcatatatgatattcctggagatatcctatctattattgatgcaaaaaacgacgattggaaaaaatattttattagtttttataaagctaattttattaacggtaatacatttattagtgatagaacgtttaacgaggacttattcagagttgttgttcaaatagatcccgaatatttcgataatgaacgaattatgtctttattctctacgagtgctgcggacattaaacgatttgatgagttagatattaataacagttatatatctaatataatttatgaggtgaacgatatcacattagatacaatggatgatatgaagaagtgtcaaatctttaacgaggatacgtcgtattatgttaaggaatacaatacatacctgtttttgcacgagtcggatcccatggtcatagagaacggaatactaaagaaactgtcatctataaaatccaagagtagacggctgaacttgtttagcaaaaacattttaaaatattatttagacggacaattggctcgtctaggtcttgtgttagatgattataaaggagacttgttagttaaaatgataaaccatcttaagtctgtggaggatgtatccgcattcgttcgattttctacagataaaaaccctagtattcttccatcgctaatcaaaactattttagctagttataatatttccatcatcgtcttatttcaaaggtttttgagagataatctatatcatgtagaagaattcttggataaaagcatccatctaaccaagacggataagaaatatatacttcaattgataagacacggtagatcatagaacagaccaaatatattattaataatttgtatatacatagatataattatcacacatttttgataaatgggaactgctgcaacaattcagactcccaccaaattaatgaataaagaaaatgcagaaatgattttggaaaaaattgttgatcatatagttatgtatattagtgacgaatcaagtgattcagaaaataatcctgaatatattgattttcgtaacagatacgaagactatagatctctcattataaaaagtgatcacgagtttgtaaagctatgtaaaaatcatgcggagaaaagttctccagaaacgcaacaaatgattatcaaacacatatacgaacaatatcttattccagtatctgaagtactattaaaacctataatgtccatgggtgacataattacatataacggatgtaaagacaatgaatggatgctagaacaactctctaccctaaactttaacaatctccgcacatggaactcatgtagcataggcaatgtaacgcgtctgttttatacattttttagttatctgatgaaagataaactaaatatataagtataatcccattctaatactttaacctgatgtattagcatcttattagaatattaacctaactaaaagacataacataaaaactcattacatagttgataaaaagcggtaggatataaatattatggctgccaccgttccgcgttttgacgacgtgtacaaaaatgcacaaagaagaattctagatcaagaaacattttttagtagaggtctaagtagaccgttaatgaaaaacacatatctatttgataattacgcgtatggatggataccagaaactgcaatttggagtagtagatacgcaaacctagatgctagtgactattatcccatttcgttgggattacttaaaaagttcgagtttctcatgtctctatataaaggtcctattcccgtatatgaagaaaaagtaaatactgaattcatagccaatggatcgttctctggtagatacgtatcatatcttcgaaagttttctgcccttccaacaaacgagtttattagttttttgttactgacttccattccaatctataatatcttgttctggtttaaaaacacacagtttgatattactaaacacacattattcagatacgtctatacagataatgccaaacacctggcgttggctaggtatatgcatcaaacaggagactataagcctttgtttagtcgtctcaaagagaattatatatttaccggtcccgttccaataagtatcaaagatatagatcaccctaatcttagtagagcaagaagtccatccgattatgagacattagctaatattagtactatattgtactttaccaagtatgatccggtattaatgtttttattgttttacgtacctgggtattcaattactacaaaaattactccagccgtagaatatctaatggataaactgaatctaacaaagagcgacgtacaactgttgtaaattattttatgcttcgtaaaatgtaggttttgaaccaaacattctttcaaagaatgagatgcataaaactttattatccaatagattgactatttcggacgtcaatcgtttaaagtaaacttcgtaaaatattctttgatcactgccgagtttaaaacttctatcgataattgtctcatatgttttaatatttacaagttttttggtccatggtacattagccggacaaatatatgcaaaataatatcgttctccaagttctatagtttctggattatttttattatattcagtaactaaatacatattagggttatctgcggatttataatttgagtgatgcattctactcaacataaataattctagaggagacgatctactatcaaattcggatcgtaaatctgtttctaaagaacggagaatatctatacatacctgattagaattcatccgtccttcagacaacatctcagacagtctggttttgtacatcttaatcatattcttatgaaacttggaaacatctcttctagtttcactagtacctttattaattctctcaggtacagattttgaattcgacgatgctgagtatttcatcgttgtatatttcttcttcgattgcataatcagattcttatataccgcctcaaactctattttaaaattattaaacaatactctattattaatcagtcgttctaactctttcgctatttctatagacttatctacatcttgactgtctatctctgtaaacacggagtcggtatctccatacacgctacgaaaacgaaatctgtaatctataggcaacgatgttttcacaatcggattaatatctctatcgtccatataaaatggattacttaatggattggcaaaccgtaacataccgttagataactctgctccatttagtaccgattctagatacaagatcattctacgtcctatggatgtgcaactcttagccgaagcgtatgagtatagagcactatttctaaatcccatcagaccatatactgagttggctactatcttgtacgtatattgcatggaatcatagatggccttttcagttgaactggtagcctgttttagcatctttttatatctggctctctctgccaaaaatgttcttaatagtctaggaatggttccttctatcgatctatcgaaaattgctatttcagagatgaggttcggtagtctaggttcacaatgaaccgtaatatatctaggaggtggatatttctgaagcaatagctgattatttatttcttcttccaatctattggtactaacaacgacaccgactaatgtttccggagatagatttccaaagatacacacattaggatacagactgttataatcaaagattaatacattattactaaacattttttgttttggagcaaataccttaccgccttcataaggaaacttttgttttgtttctgatctaactaagatagttttagtttccaacaatagctttaacagtggacccttgatgactgtactcgctctatattcgaataccatggattgaggaagcacatatgttgacgcacccgcgtctgtttttgtttctactccataatactcccacaaatactgacacaaacaagcatcatgaatacagtatctagccatatctaaagctatgtttagattataatccttatacatctgagctaaatcaacgtcatcctttccgaaagataatttatatgtatcattaggtaaagtaggacataatagtacgactttaaatccattttcccaaatatctttacgaattactttacatataatatcctcatcaacagtcacataattacctgtggttaaaacctttgcaaatgcagcggctttgcctttcgcgtctgtagtatcgtcaccgatgaacgtcatttctctaactcctctatttaatactttacccatgcaactgaacgcgttcttggatatagaatccaatttgtacgaatccaatttttcaaatttttgaatgaatgaatatagatcgaaaaatatagttccattattgttattaacgtgaaacgtagtattggccatgccgcctactcccttatgactagactgatttctctcataaatacagagatgtacagcttcctttttgtccggagatctaaagataattttctctcctgttaataactctagacgattagtaatatatctcagatcaaagttatgtccgttaaaggtaacgacgtagtcgaacgttagttccaacaattgtttagctattcgtaacaaaactatttcagaacatagaactagttctcgttcgtaatccatttccattagtgactgtatcctcaaacatcctctatcgacggcttcttgtatttcctgttccgttaacatctcttcattaatgagcgtaaacaataatcgtttaccacttaaatcgatataacagtaacttgtatgcgagattgggttaataaatacagaaggaaacttcttatcgaagtgacactctatatctagaaataagtacgatcttgggatatcgaatctaggtatttttttagcgaaacagttacgtggatcgtcacaatgataacatccattgttaatctttgtcaaatattgctcgtccaacgagtaacatccgtctggagatatcccgttagaaatataaaaccaactaatattgagaaattcatccatggtggcattttgtatgctgcgtttctttggctcttctatcaaccacatatctgcgacggagcattttctatctttaatatctagattataacttattgtctcgtcaatgtctatagttctcatctttcccaacggcctcgcattaaatggaggaggagacaatgactgatatatttcgtccgtcactacgtaataaaagtaatgaggaaatcgtataaatacggtctcgccatttcgacatctggatttcagatataaaaatctgttttcaccgtgactttcaaaccaattaatgcaccgaacatccatttatagaatttagaaatatattttcatttaaatgaatcccaaacattggggaagagccgtatggaccattatttttatagtactttcgcaagcgggtttagacggcaacatagaagcgtgtaaacgaaaactatatactatagttagcactcttccatgtcctgcatgtagacggcacgcgactatcgctatagaggacaataatgtcatgtctagcgatgatctgaattatatttattattttttcatcagattatttaacaatttggcatctgatcccaaatacgcgatcgatgtgacaaaggttaaccctttataaacttaacccattataaaacttatgattagtcacaactgaaataaccgcgtgattattttttggtataattctacacggcatggtttctgtgactatgaattcaacccccgttacattagtgaaatctttaacaaacagcaagggttcgtcaaagacataaaactcattgtttacaatcgaaatagaccccctatcacacttaaaataaaaaatatccttatcctttaccaccaaataaaattctgattggtcaatgtgaatgtattcacttaacagttccacaaatttatttattaactccgaggcacatacatcgtcggtattttttatggcaaactttactcttccagcatccgtttctaaaaaaatattaacgagttccatttatatcatccaatattattgaaatgacgttgatggacagatgatacaaataagaaggtacggtacctttgtccaccatctcctccaattcatgctctattttgtcattaactttaatgtatgaaaacagtacgccacatgcttccatgacagtgtgtaacactttggatacaaaatgtttgacattagtataattgtccaagactgtcaatctataatagatagtagctataatatattctatgatggtattgaagaagatgacaaccttggcatattgatcatttaacacagacatggtatcaacagatagcttgaatgaaagagaatcagtaattggaataagcgtcttctcgatagagtgtccgtataccaacatgtctgatattttgatgtattccattaaattatttagttttttctttttattctcgttaaacagcatttctgtcaacggaccccaacatcgttgaccgattaagttttgattgatttttccgtgtaaggcgtatctagtcagatcgtatagcctatccaataatccatcgtctgtgtgtagatcacatcgtacactttttaattctctatagaagagcgacagacatctggagcaattacagacagcaatttctttattctctacagatgtaagatacttgaagacattcctatgatgatgcagaattttggataacacggtattgatggtatctgttaccataattcctttgatggctgatagtgtcagagcacaagatttccaatctttgacaatttttagcaccattatctttgttttgatatctatatcagacagcatggtgcgtctgacaacacagggattaagacggaaagatgaaatgattctctcaacatcttcaatagataccttgctattttttctggcattatctatatgtgcgagaatatcctctagagaatcagtatcctttttgatgatagtggatctcaatgacatgggacgtttaaaccttcttattctatcaccagattgcatggtgatttgtcttctttcttttatcataatgtaatctctaaattcatcggcaaattgtctatatctaaaatcataatatgagatgtttacctctacaaatatctgttcgtccaatgttagagtatttacatcagttttgtattccaaattaaacatggcaacggatttaattttatattcctctattaagtcctcgtcgataataacagaatgtagataatcatttaatccgtcgtacatggttggaagatgcttgttgacaaaatctttaattgtcttgatgaaggtgggactatatctaacatcttgattaataaaatttataacattgtccataggatactttgtaactagttttatacacatctcttcatcggtaagtttagacagaatatcgtgaacaggtggtatattatattcatcagatatacgaagaacaatgtccaaatctatattgtttaatatattatatagatgtagcgtagctcctacaggaatatctttaactaagtcaatgatttcatcaaccgttagatctattttaaagttaatcatataggcattgatttttaaaaggtatgtagccttgactacattctcattaattaaccattccaagtcattgtgtgtaagaagattatattctatcataagcttgactacatttggtcccgataccattaaagaattcttatgatataaggaaacagattttaggtactcatctactctacaagaattttggagagccttaacgatatcagtgacgtttattatttcaggaggaaagaatctaacattgagaatatcggaattaatagcttccagatacagtgattttggcaatagtccgtgtaatccataatccagtaacacgagctggtgcttgctagacaccttttcaatgtttaatttttttgaaataagctttgataaagccttcctcgcaaattccggatacatgaacatgtcggcgacatgattaagtattgttttttcattatttttatattttctcaacaagttctcaataccccaatagatgatagaatatcacccaatgcgtccatgttgtctatttccaacaggtcgctatatccaccaatagaagtttttccaaaaaagattctaggaacagttctaccaccagtaatttgttcaaaataatcccgcaattcattttcgggtttaaattctttaatatcgacaatttcatacgctcctcttttgaaactaaacttatttagaatatccagtgcatttctacaaaaaggacatgtatacttgacaaaaattgtcactttgttattggccaacctttgttgtacaaattcctcggccattttaatatttaagtgatataaaactatctcgacttatttaactctttagtcgagatatatggacgcagatagctatatgatagccaactacagaaggcaaacgctataaaaaacataattacgacgagcatatttataaatatttttattcagcattacttgatatagtaatattaggcacagtcaaacattcaaccactctcgatacattaactctctcattttctttaacaaattctgcaatatcttcgtaaaaagattcttgaaactttttagaatatctatcgactctagatgaaatagcgttcgtcaacatactatgttttgtatacataaaggcgcccattttaacagtttctagtgacaaaatgctagcgatcctaggatcctttagaatcacatagattgacgattcgtctctcttagtaactctagtaaaataatcatacaatctagtacgcgaaataatattatccttgacttgaggagatctaaacaatctagttttgagaacatcgataagttcatcgggaatgacatacatactatctttaatagaactcttttcatccagttgaatggattcgtccttaaccaactgattaatgagatcttctattttatcattttccagatgatatgtatgtccattaaagttaaattgtgtagcgcttctttttagtctagcagccaatactttaacatcactaatatcgatatacaaaggagatgatttatctatggcattaagaattcgtttttcgacatccgtcaaaaccaattcctttttgcctgtatcatccagttttccatcctttgtaaagaaattattttctactagactattaataagactgataaggattcctccataattgcacaatccaaactttttaacaaaactagactttacgagatctacaggaatgcgtacttcaggttttttagcttgtgattttttcttttgcggacattttctagtaaccaactcatctaccatttcattgattttagcagtgaaataagctttcaatgcacgggcactgatactattgaaaacgagttgatcttcaaattccgccatttaagttcaccaaacaacttttaaatacaaatatatcaatagtagtagaataagaactataaaaaaaataataattaaccaaccccaacaaccggtattattagttgatgtggtagttttctcatcacttagaacagatttaacaatttctataaagtctgtcaaatcatcttccggagaccccataaatacaccaaatatagcggcgtacaacttatccatttatacattgaatattggcttttctttatcgctatcttcatcatattcatcatcaatatcaacaagtcccagattacgagccagatcttcttctacattttcagtcattgatacacgttcactatctccagagagtccgataacgttagccaccacttctctatcaatgattagtttcttgagcgcgaaagtaatttttgtttccgttccggatctatagaagacgataggtgtgataattgccttggccaattgtctttctcttttactgagtgattctagttcaccttctatagatctgagaatggatgattctccagtcgaaacatattctaccatggatccgtttaatttgttgatgaagatggattcatccttaaatgttttctctgtaatagtttccaccgaaagactatgcaaagaatttggaatgcgttccttgtgcttaatgtttccatagacggcttctagaagttgatacaacataggactagccgcggtaacttttatttttagaaagtatccatcgcttctatcttgtttagatttatttttataaagtttagtctctccttccaacataataaaagtggaagtcatttgactagataaactatcagtaagttttatagagatagacgaacaattagcgtattgagaagcatttagtgtaacgtattcgatacattttgcattagatttactaatcgattttgcatactctataacacccgcacaagtctgtagagaatcgctagatgcagtaggtcttggtgaagtttcaactctcttcttgattaccttactcatgattaaacctaaataattgtactttgtaatataatgatatatattttcactttatctcatttgagaataaaaatgtttttgtttaaccactgcatgatgtacagatttcggaatcgcaaaccaccagtggttttattttatccttgtccaatgtgaattgaatgggagcggatgcgggtttcgtacgtagatagtacattcccgtttttagaccgagactccatccgtaaaaatgcatactcgttagtttggaataactcggatctgctatatggatattcatagattgactttgatcgatgaaggctcccctgtctgcagccatttttatgatcgtcttttgtggaatttcccaaatagttttataaactcgcttaatatcttctggaaggtttgtattctgaatggatccaccatctgccataatcctattcttgatctcatcattccataattttctctcggttaaaactctaaggagatgcggattaactacttgaaattctccagacaatactctccgagtgtaaatattactggtatacggttccaccgactcattatttcccaaaatttgagcagttgatgcagtcggcataggtgccaccaataaactatttctaagaccgtatgttctgattttatcttttagaggttcccaattccaaagatccgacggtacaacattccaaagatcatattgtagaataccgttactggcgtacgatcctacatatgtatcgtatggtccttccttctcagctagttcacaactcgcctctaatgcaccgtaataaatggtttcgaagatcttcttatttagatcttgtgcttccaggctatcaaatggataatttaagagaataaacgcgtccgctaatccttgaacaccaataccgataggtctatgtctcttattagagatttcagcttctggaataggataataattaatatctataattttattgagatttctgacaattactttgaccacatccttcagtttgagaaaatcaaatcgcccatctattacaaacatgttcaaggcaacagatgccagattacaaacggctacctcattagcatccgcatattgtattatctcagtgcaaagattactacacttgatagttcctaaattttgttgattactctttttgttacacgcatccttataaagaatgaatggagtaccagtttcaatctgagattctataatcgctttccagacgactcgagcctttattatagatttgtatctcctttctctttcgtatagtgtatacaatcgttcgaactcgtctccccaaacattgtccaatccaggacattcatccggacacatcaacgaccactctccgtcatccttcactcgtttcataaagagatcaggaatccaaagagctataaatagatctctggttctatgttcctcgtttcctgtattctttttaagatcgaggaacgccataatatcagaatgccacggttccaagtatatggccataactccaggccgtttgtttcctccctgatctatgtatctagcggtgttattataaactctcaacattggaataataccgtttgatataccattggtaccggagatatagcttccactggcacgaatattactaattgatagacctattccccctgccattttagagattaatgcgcatcgttttaacgtgtcatagataccctctatgctatcatcgatcatgttaagtagaaaacagctagacatttggtgacgactagttcccgcattaaataaggtaggagaagcgtgcgtaaaccatttttcagaaagtagattgtacgtctcaatagctgagtctatatcccattgatgaattcctactgcgacacgcattaacatgtgctgaggtctttcaacgatcttgttgtttattttcaacaagtaggatttttccaaagttttaaaaccaaaatagttgtatgaaaagtctcgttcgtaaataataaccgagttgagtttatccttatatttgttaactatatccatggtgatacttgaaataatcggagaatgtttcccatttttaggattaacatagttgaataaatcctccatcacttcactaaatagtttttttgtttccttgtgtagatttgatacggctattctggcggctagaatggcataatccggatgttgtgtagtacaagtggctgctatttcggctgccagagtgtccaattctaccgttgttactccattatatattccttgaataaccttcatagctattttaataggatctatatgatccgtgtttaagccataacataattttctaatacgagacgtgattttatcaaacatgacattttccttgtatccatttcgtttaatgacaaacatttttgttggtgtaataaaaaaattatttaacttttcattaatagggatttgacgtatgtagcgtacaaaatgattgttcctggtatatagataaagagtcctatatatttgaaaatcgttacggctcgattaaactttaatgattgcatagtgaatatatcattaggatttaactccttgactatcatggcggcgccagaaattaccatcaaaagcattaatacagttataccgatcgcagttagaacggttatagcatccaccatttatatctaaaaattagatcaaagaatatgtgacaaagtcctagttgtatactgagaattgacgaaacaatgtttcttacatatttttttcttattagtaaccgacttaatagtaggaactggaaaactagacttgattattctataagtatagatacccttccaaataatattctctttgataaaagttccagaaaatgtagaattttttaaaaagttatcttttgctattaccaagattgtgtttagacgcttattattaatatgagtgatgaaatccacaccgcctctagatatcgcctttatttccacattagatggtaaatccaatagtgaaactatctttttaggaatgtatggactcgcgtttagaggagtaaacgtcttaggcgtcggaaaggatgattcatcaaacgaataaacaatttcacaaatggatgttaatgtattagtaggaaattttttgacgctattggaattgaagattctaatggatgatgttctacctatttcatccgataacatgttaatttccgacaccaacggttttaatatttcgatgatatacggtagtctctctttcggacttatatagcttattccacaatacgagtcattatatactccaaaaaacaaaataactagtataaaatctgtatcgaatgggaaaaacgaaattatcgacataggtatagaatccggaacattgaacgtattaatacttaattctttttctgtggtaagtaccgataggttattgacattgtatggttttaaatattctataacttgagacttgatagatattagtgatgaattgaaaattatttttatcaccacgtgtgtttcaggatcatcgtcgacgcccgtcaaccaaccgaacggagtaaaataaatatcattaatatatgctctagatattagtatttttatcaatcctttgattatcatcttctcgtaggcgaatgattccatgatcaagagtgatttaagaacatcctccggagtattaatgggcttagtaaacagtccatcgttgcaataataaaagttatccaagttaaaggatattatgcattcgtttaaagatatcacctcatctgacggagacaattttttggtaggttttagagactttgaagctacttgtttaacaaagttattcatcgtcgtctactattctatttaattttgtagttaatttatcacatatcacattaattgactttttggtccacttttccatacgtttatattcttttaatcctgcgttatccgtttccgttatatccagggatagatcttgcaagttaaatagaatgctcttaaataatgtcattttcttatccgctaaaaatttaaagaatgtataaacctttttcagagatttgaaactcttaggtggtgtcctagtacacaatatcataaacaaactaataaacattccacattcagattccaacagctgattaacttccacattaatacagcctattttcgctccaaatgtacattcgaaaaatctgaataaaacatcgatgtcacaatttgtattatccaatacagaatgtttgtgattcgtgttaaaaccatcggagaaggaatagaaataaaaattattatagtggtggaattcagttggaatattgcctccggagtcataaaaggatactaaacattgttttttatcataaattacacatttccaatgagacaaataacaaaatccaaacattacaaatctagaggtagaacttttaattttgtctttaagtatatacgataagatatgtttattcataaacgcgtcaaatttttcatgaatcgctaaggagtttaagaatctcatgtcaaattgtcctatataatccacttcggatccataagcaaactgagagactaagttcttaatacttcgattgctcatccaggctcctctctcaggctctattttcatcttgacgacctttggattttcaccagtatgtattcctttacgtgataaatcatcgattttcaaatccatttgtgagaagtctatcgccttagatactttttcccgtagtcgaggtttaaaaaaatacgctaacggtatactagtaggtaactcaaagacatcatatatagaatggtaacgcgtctttaactcgtcggttaactctttcttttgatcgagttcgtcgctactattgggtctgctcaggtgccccgactctactagttccaacatcataccgataggaatacaagacactttgccggcggttgtagatttatcatatttttccactacatatccgttacaatttgttaaaaatttagatacatctatattgctacataatccagctagtgaatatatatgacataataaattggtaaatcctagttctggtattttactaattactaaatctgtatatctttccatttatcatggaaaagaatttaccagatatcttcttttttccaaactgcgttaatgtattctcttacaaatattcacaagatgaattcagtaatatgagtaaaacggaacgtgatagtttctcattggccgtgtttccagttataaaacatagatggcataacgcacacgttgtaaaacataaaggaatatacaaagttagtacagaagcacgtggaaaaaaagtatctcctccatcactaggaaaacccgcacacataaacctaaccgcgaagcaatatatatacagtgaacacacaataagctttgaatgttatagttttctaaaatgtataacaaatacagaaatcaattcgttcgatgagtatatattaagaggactattagaagctggtaatagtttacagatattttccaattccgtaggtaaacgaacagatactataggtgtactagggaataagtatccatttagcaaaattccattggcctcattaactcctaaagcacaacgagagatattttcagcgtggatttctcatagacctgtagttttaactggaggaactggagtgggtaagacgtcacaggtacccaagttattgctttggtttaattatttatttggtggattctctactctagataaaatcactgactttcacgaaagaccagtcattctatctcttcctaggatagctttagttagattgcatagcaataccattttaaaatcattgggatttaaggtactagatggatctcctatttctttacggtacggatctataccggaagaattaataaacaaacaaccaaaaaaatatggaattgtattttctacccataagttatctctaacaaaactatttagttatggcactcttattatagacgaagttcatgagcatgatcaaataggagatattattatagcagtagcgagaaagcatcatacgaaaatagattctatgtttttaatgactgccacgttagaggatgacagggaacggctaaaagtatttttacctaatcccgcatttatacatattcctggagatacactgtttaaaattagcgaggtatttattcataataagataaatccatcttccagaatggcatacatagaagaagaaaagagaaatttagttactgctatacagatgtatactcctcctgatggatcatccggtatagtctttgtggcatccgttgcacagtgtcacgaatataaatcatatttagaaaaaagattaccgtatgatatgtatattattcatggtaaggtcttagatatagacgaaatattagaaaaagtgtattcatcacctaatgtatcgataattatttctactccttatttggaatccagcgttactatacgcaatgttacacacatttatgatatgggtagagtttttgtccccgctccttttggaggatcgcaacaatttatttctaaatctatgagagatcaacgaaaaggaagagtaggaagagttaatcctggtacatacgtctatttctatgatctgtcttatatgaagtctatacagcgaatagattcagaatttctacataattatatattgtacgctaataagtttaatctaacactccccgaagatttgtttataatccctacaaatttggatattctatggcgtacaaaggaatatatagactcgttcgatattagtacagaaacatggaataaattattatccaattattatatgaagatgatagagtatgctaaactttatgtactaagtcctattctcgctgaggagttggataactttgagaggacgggagaattaactagtattgtacgagaagccattttatctctaaatttacaaattaagattttaaattttaaacataaagatgatgatacgtatatacacttttgtaaaatattattcggtgtctataacggaacaaacgctactatatattatcatagacctctaacgggatatatgaatatgatttcagatactatatttgttcctgtagataataactaaaaatcaaactctaatgaccacatctttttttagagatgaaaaattttccacatctccttttgtagacacgactaaacattttgcagaaaaaagtttattagtgtttagataatcgtatacttcatcagtgtagatagtaaatgtgaacagataaaaggtattcttgctcaatagattggtaaattccatagaatatattaatcctttcttcttgagatcccacatcatttcaaccagagacgttttatccaatgatttacctcgtactataccacatacaaaactagattttgcagtgacgtcgtacctggtattcctaccaaacaaaattttacttttagttcttttagaaaattctaaggtagaatctctatttgccaatatgtcatctatggaattaccactagcaaaaaatgatagaaatatatattgatacatcgcagctggttttgatctactatactttaaaaacgaatcagattccataattgcctgtatatcatcagctgaaaaactatgttttacacgtattccttcggcatttctttttaatgatatatcttgtttagacaatgataaagttatcatgtccatgagagacgcgtctccgtatcgtataaatatttcattagatgttagacgcttcattaggggtatacttctataaggtttcttaatcagtccatcattggttgcgtcaagaactactatcggatgttgttgggtatctctagtgttacacatggccttactaaagtttgggtaaataactatgatatctctattaattatagatgcatatatttcattcgtcaaggatattagtatcgacttgctatcgtcattaatacgtgtaatgtaatcatataaatcatgcgatagccaaggaaaatttaaatagatgttcatcatataatcgtcgctataattcatattaatacgttgacattgactaatttgtaatatagcctcgccacgaagaaagctctcgtattcagtttcatcgataaaggataccgttaaatataactggttgccgatagtctcatagtctattaagtggtaagtttcgtacaaatacagaatccctaaaatattatctaatgttggattaatctttaccataactgtataaaatggagacggagtcataactattttaccgtttgtacttactggaatagatgaaggaataatctccggacatgctggtaaagacccaaatgtctgtttgaagaaatccaatgttccaggtcctaatctcttaacaaaaattacgatattcgatcccgatatcctttgcattctatttaccagcatatcacgaactatattaagattatctatcatgtctattctcccaccgttatataaatcgcctccgctaagaaacgttagtatatccatacaatggaatacttcatttctaaaatagtattcgttttctaattctttaatgtgaaatcgtatactagaaagggaaaaattatctttgagttttccgttagaaaagaaccacgaaactaatgttctgattgcgtccgattccgttgctgaattaatggatttacaccaaaaactcatataacttctagatgtagaagcattcgctaaaaaattagtagaatcaaaggatataagtagatgttccaacaagtgagcaattcccaagatttcatctatatcattctcgaatccgaaattagaaattcccaagtagatatcctttttcatccgatcgttgatgaaaatacgaactttattcggtaagacaatcatttactaaggagtaaaataggaagtaatgttcgtatgtcgttatcatcgtataaattaaaggtgtgttttttaccattaagtgacattataattttaccaatattggaattataatataggtgtatttgcgcactcgcgacggttgatgcatcggtaaatatagctgtatctaatgttctagtcggtatttcatcatttcgctgtctaataatagcgttttctctatctgtttccattacagctgcctgaagtttattggtcggataatatgtaaaataataagaaatacatacgaataacaaaaataaaataagatataataaagatgccatttagagatctaattttgtttaacttgtccaaattcctacttacagaagatgaggaatcgttggagatagtgtcttccttatgtagaggatttgaaatatcttataatgacttgataacttactttccagataggaaataccataaatatatttataaagtatttgaacatgtagatttatcggaggaattaagtatggaattccatgatacaactctgagagatttagtctatcttagattgtacaagtattccaagtgtatacggccgtgttataaattaggagataatctaaaaggcatagttgttataaaggacaggaatatttatattagggaagcaaatgatgacttgatagaatatctcctcaaggaatacactcctcagatttatacatattctaatgagcgcgtccccataactggttcaaaattaattctttgtggattttctcaagttacatttatggcgtatacaacgtcgcatataacaacaaataaaaaggtagatgttctcgtttccaaaaaatgtatagatgaactagtcgatccaataaattatcaaatacttcaaaatttatttgataaaggaagcggaacaataaacaaaatactcaggaagatattttattcggtaacaggtggccaaactccataggtagctttttctatttcggattttagaatttccaaattcaccagcgatttatcggttttggtgaaatccaaggatttattaatgtccacaaatgccatttgttttgtctgtggattgtatttgaaaatggaaacgatgtagttagatagatgcgctgcgaagtttcctattagggttccgcgcttcacgtcacccagcatacttgaatcaccatcctttaaaaaaaatgataagatatcaacatggagtatatcatactcgaattttaattcttctactgactcactgacattttcacaaatactacaatacggtttaccgaaaataatcagtacgttcttcatttatgggtatcaaaaacttaaaatcgttactgctggaaaataaatcactgacgatattagatgataatttatacaaagtatacaatggaatatttgtggatacaatgagtatttatatagccgtcgccaattgtgtcagaaacttagaagagttaactacggtattcataaaatacgtaaacggatgggtaaaaaagggagggcatgtaaccctttttatcgatagaggaagtataaaaattaaacaagacgttagagacaagagacgtaaatattctaaattaaccaaggacagaaaaatgttagaattagaaaagtgtacatccgaaatacaaaatgttaccggatttatggaagaagaaataaaggcagaaatgcaattaaaaatcgataaactcacatttcaaatatatttatctgattctgataacataaaaatatcattgaatgagatactaacacatttcaacaataatgagaatgttacattattttattgtgatgaacgagacgcagaattcgttatgtgtctcgaggctaaaacacatttctctaccacaggagaatggccgttgataataagtaccgatcaggatactatgctatttgcatctgctgataatcatcctaagatgataaaaaacttaactcaactgtttaaatttgttccctcggcagaggataactatttagcaaaattaacggcgttagtgaatggatgtgatttctttcctggactctatggggcatctataacacccaccaacttaaacaaaatacaattgtttagtgattttacaatcgataatatagtcactagtttggcaattaaaaattattatagaaagactaactctaccgtagacgtgcgtaatattgttacgtttataaacgattacgctaatttagacgatgtctactcgtatattcctccttgtcaatgcactgttcaagaatttatattttccgcattagatgaaaaatggaatgaatttaaatcatcttatttagaaagcgtgccgttaccctgccaattaatgtacgcgttagaaccacgcaaggagattgatgtttcagaagttaaaactttatcatcttatatagatttcgaaaatactaaatcagatatcgatgttataaaatctatatcctcgatcttcggatattctaacgaaaactgtaacacgatagtattcggcatctataaggataatttactactgagtataaataattcattttactttaacgatagtctgttaataaccaatactaaaagtgataatataataaatataggttactagattaaaaatggtgttccaactcgtgtgctctacatgcggtaaagatatttctcacgaacgatataaattgattatacgaaaaaaatcattaaaggatgtactcgtcagtgtaaagaacgaatgttgtaggttaaaattatctacacaaatagaacctcaacgtaacttaacagtgcaacctctattggatataaactaatatggatccggttaattttatcaagacatatgcgcctagaggttctattatttttattaattataccatgtcattaacaagtcatttgaatccatcgatagaaaaacatgtgggtatttattatggtacgttattatcggaacacttggtagttgaatctacctatagaaaaggagttcgaatagtcccattggatagtttttttgaaggatatcttagtgcaaaagtatacatgttagagaatattcaagttatgaaaatagcagctgatacgtcattaactttattgggtattccgtatggatttggtcatgatagaatgtattgttttaaattggtagctgactgttataaaaatgccggtattgatacatcgtctaaacgaatattgggcaaagatatttttctgagccaaaacttcacagacgataatagatggataaagatatatgattctaataatttaacattttggcaaattgattaccttaaagggtgagttaatatgcataactactcctccgttgttttttccctcgttctttttcttaacgttgtttgccatcactctcataatgtaaagatattctaaaatggtaaacttttgcatatcggacgcagaaattggtataaatgttgtaattgtattatttcccgtcaatggactagtcacagctccatcagttttatatcctttagagtatttctcactcgtgtctaacattctagagcattccatgatctgtttatcgttgatattggccggaaagatagattttttattttttattatattactattggcaattgtagatataacttctggtaaatatttttctaccttttcaatctcttctattttcaagccggctatatattctgctatattgttgctagtatcaataccttttctggctaagaagtcatatgtggtattcactatatcagttttaactggtagttccattagcctttccacttctgcagaataatcagaaattggttctttaccagaaaatccagctactataataggctcaccgatgatcattggcaaaatcctatattgtaccagattaatgagagcatatttcatttccaataattctgctagttcttgagacattgatttatttgatgaatctagttggttctctagatactctaccatttctgccgcatacaataacttgttagataaaatcagggttatcaaagtgtttagcgtggctagaatagtgggcttgcatgtattaaagaatgcggtagtatgagtaaaccgttttaacgaattatatagtctccagaaatctgtggcgttacatacatgagccgaatgacatcgaagattgtccaatatttttaatagctgctctttgtccattatttctatatttgactcgcaacaattgtagataccattaatcaccgattcctttttcgatgccggacaatagcacaattgtttagctttggactctatgtattcagaattaatagatatatctctcaatacagattgcactatacattttgaaactatgtcaaaaattgtagaacgacgctgttctgcagccatttaactttaaataatttacaaaaatttaaaatgagcatccgtataaaaatcgataaactgcgccaaattgtggcatatttttcagagttcagtgaagaagtgtctataaatgtagactcgacggatgagttaatgtatatttttgccgccttgggcggatctgtaaacatttgggcaattatacctctaagtgcatcagtgttttaccgaggagccgaaaatattgtgtttaatcttcctgtgtccaaggtaaaatcgtgtttgtgtagttttcacaatgatgccatcatagatatagaacctgatctggaaaataatctagtaaaactttctagttatcatgtagtaagtgtcgattgtaacaaggaactgatgcctattaggacagatactactatttgtctaagtatagatcaaaagaaatcttacgtgtttaattttcacaagtatgaagaaaaatgttgtggtagaaccgtcattcatctagaatggttgttgggctttatcaagtgtattagtcagcatcagcatctggctattatgtttaaagatgacaatattattatgaagactcctggtaatactgatgcgttttccagggaatattctatgactgaatgttctcaagaactacaaaagttttctttcaaaatagctatctcgtctctcaacaaactacgaggattcaaaaagagagtcaatgtttttgaaactagaatcgtaatggataatgacgataacattttaggaatgttgttttcggatagagttcaatcctttaagatcaacatctttatggcgtttttagattaatactttcaatgagataaatatgggtggcggagtaagtgttgagctccctaaacgggatccgcctccgggagtacccactgatgagatgttattaaacgtggataaaatgcatgacgtgatagctcccgctaagcttttagaatatgtgcatataggaccactagcaaaagataaagaggataaagtaaagaaaagatatccagagtttagattagtcaacacaggacccggtggtctttcggcattgttaagacaatcgtataatggaaccgcacccaattgctgtcgcacttttaatcgtactcattattggaagaaggatggaaagatatcagataagtatgaagagggtgcagtattagaatcgtgttggccagacgttcacgacactggaaaatgcgatgttgatttattcgactggtgtcagggggatacgttcgatagaaacatatgccatcagtggatcggttcagcctttaataggagtaatagaactgtagagggtcaacaatcgttaataaatctgtataataagatgcaaacattatgtagtaaagatgctagtgtaccaatatgcgaatcatttttgcattatttacgcgcacacaatacagaagatagcaaagagatgatcgattatattctaagacaacagtctgcggactttaaacagaaatatatgagatgtagttatcccactagagataagttagaagagtcattaaaatatgcggaacctcgagaatgttgggatccagagtgttcgaatgccaatgttaatttcttactaacacgtaattataataatttaggactttgcaatattgtacgatgtaataccagcgtgaacaacttacagatggataaaacttcctcattaagattgtcatgtggattaagcaatagtgatagattttctactgttcccgtcaatagagcaaaagtagttcaacataatattaaacactcgttcgacctaaaattgcatttgatcagtttattatctctcttggtaatatggatactaattgtagctatttaaatgggtgccgcggcaagcatacagacgacggtgaatacactcagcgaacgtatctcgtctaaattagaacaagaagcgaacgctagtgctcaaacaaaatgtgatatagaaatcggaaatttttatatccgacaaaaccatggatgtaacctcactgttaaaaatatgtgctctgcggacgcggatgctcagttggatgctgtgttatcagccgctacagaaacatatagtggattaacaccggaacaaaaagcatacgtgccagctatgtttactgctgcgttaaacattcagacgagtgtaaacactgttgttagagattttgaaaattatgtgaaacagacttgtaattctagcgcggtcgtcgataacaaattaaagatacaaaacgtaatcatagatgaatgttacggagccccaggatctccaacaaatttggaatttattaatacaggatctagcaaaggaaattgtgccattaaagcgttgatgcaattgacgactaaggccactactcaaatagcacctagacaagttgctggtacaggagttcagttttatatgattgttatcggtgttataatattggcagcgttgtttatgtactatgccaagcgtatgttgttcacatccaccaatgataaaatcaaacttattttagccaataaggaaaacgtccattggactacttacatggacacattctttagaacttctccgatggttattgctaccacggatatgcaaaactgaaaatatattgataatattttaatagattaacatggaagttatcgctgatcgtctagacgatatagtgaaacaaaatatagcggatgaaaaatttgtagattttgttatacacggtctagagcatcaatgtcctgctatacttcgaccattaattaggttgtttattgatatactattatttgttatagtaatttatatttttacggtacgtctagtaagtagaaattatcaaatgttgttggtggtgctagtcatcacattaactattttttattactttatactataatagtactagactgacttctaacaaacatctcacctgccataaataaatgcttgatattaaagtcttctatttctaacactattccatctgtggaaaataatactctgacattatcgctaattgacacatcggtgagtgatatgcctataaagtaataatcttctttgggcacatataccagtgtaccaggttctaacaacctatttactggtgctcctgtagcatactttttctttaccttgagaatatccatcgtttgcttggtcaatagcgatatgtgattttttatcaaccactcaaaaaagtaattggagtgttcatatcctctacgggctattgtctcatggccgtgtatgaaatttaagtaacacgactgtggtagatttgttctatagagccgattgccgcaaatagatagaactaccaatatgtctgtacaaatgttaaacattaattgattaacagaaaaaacaatgttcgttctgggaatagaaaccagatcaaaacaaaattcgttagaatatatgccacgtttatacatggaatataaaataactacagtttgaaaaataacagtatcatttaaacatttaacttgcggggttaatctcacaactttactgtttttgaactgttcaaaatatagcatcgatccgtgagaaatacgtttagccgcctttaatagaggaaatcccaccgcctttctggatctcaccaacgacgatagttctgaccagcaactcatttcttcatcatccacctgttttaacatataataggcaggagatagatatccgtcattgcaatattccttctcgtaggcacacaatctaatattgataaaatctccattctcttctctgcatttattatcttgtctcggtggctgattaggctgtggtcttggtttaggccttggtctatcgttgttgaatctattttggtcattaaatctttcatttcttcctggtatatttctatcacctcgtttggttggatttttgtctatattatcgtttgtaacatcggtacgggtattcatttatcacaaaaaaaacttctctaaatgagtctactgctagaaaacctcatcgaagaagataccatattttttgcaggaagtatatctgagtatgatgatttacaaatggttattgccggcgcaaaatccaaatttccaagatctatgctttctatttttaatatagtacctagaacgatgtcaaaatatgagttggagttgattcataacgaaaatatcacaggagcaatgtttaccacaatgtataatataagaaacaatttgggtctaggagatgataaactaactattgaagccattgaaaactatttcttggatcctaacaatgaagttatgcctcttattattaataatacggatatgactgccgtcattcctaaaaaaagtggtaggagaaagaataagaacatggttatcttccgtcaaggatcatcacctatcttgtgcattttcgaaactcgtaaaaagattaatatttataaagaaaatatggaatccgcgtcgactgagtatacacctatcggagacaacaaggctttgatatctaaatatgcgggaattaatgtcctgaatgtgtattctccttccacatccataagattgaatgccatttacggattcaccaataaaaataaactagagaaacttagtactaataaggaactagaatcgtatagttctagccctcttcaagaacccattaggttaaatgattttctgggactattggaatgtgttaaaaagaatattcctctaacagatattccgacaaaggattgattactataaatggagaatgttcctaatgtatactttaatcctgtgtttatagagcccacgtttaaacattctttattaagtgtttataaacacagattaatagttttatttgaagtattcgttgtattcattctaatatatgtattttttagatctgaattaaatatgttcttcatgcctaaacgaaaaatacccgatcctattgatagattacgacgtgctaatctagcgtgtgaagacgataaattaatgatctatggattaccatggatgacaactcaaacatctgcgttatcaataaatagtaaaccgatagtgtataaagattgtgcaaagcttttgcgatcaataaatggatcacaaccagtatctcttaacgatgttcttcgcagatgatgattcattttttaagtatttggctagtcaagatgatgaatcttcattatctgatatattgcaaatcactcaatatctagactttctgttattattattgatccaatcaaaaaataaattagaagctgtgggtcattgttatgaatctctttcagaggaatacagacaattgacaaaattcacagactttcaagattttaaaaaactgtttaacaaggtccctattgttacagatggaagggtcaaacttaataaaggatatttgttcgactttgtgattagtttgatgcgattcaaaaaagaatcctctctagctaccaccgcaatagatcctgttagatacatagatcctcgtcgcaatatcgcattttctaacgtgatggatatattaaagtcgaataaagtgaacaataattaattctttattgtcatcatgaacggcggacatattcagttgataatcggccccatgttttcaggtaaaagtacagaattaattagacgagttagacgttatcaaatagctcaatataaatgcgtgactataaaatattctaacgataatagatacggaacgggactatggacgcatgataagaataattttgaagcattggaagcaactaaactatgtgatgtcttggaatcaattacagatttctccgtgataggtatcgatgaaggacagttctttccagacattgtttaattctgtgagcgtatggcaaacggtaccgagctcttttttttttttttttttttggcatataaataagtcgactccctatcagtgatagagaatggtgaagcgtgagaaaaatgtcatctatggccctgagcctctccatcctttggaggatttgactgccggcgaaatgctgtttcgtgctctccgcaagcactctcatttgcctcaagccttggtcgatgtggtcggcgatgaatctttgagctacaaggagttttttgaggcaaccgtcttgctggctcagtccctccacaattgtggctacaagatgaacgacgtcgttagtatctgtgctgaaaacaatacccgtttcttcattccagtcatcgccgcatggtatatcggtatgatcgtggctccagtcaacgagagctacattcccgacgaactgtgtaaagtcatgggtatctctaagccacagattgtcttcaccactaagaatattctgaacaaagtcctggaagtccaaagccgcaccaactttattaagcgtatcatcatcttggacactgtggagaatattcacggttgcgaatctttgcctaatttcatctctcgctattcagacggcaacatcgcaaactttaaaccactccacttcgaccctgtggaacaagttgcagccattctgtgtagcagcggtactactggactcccaaagggagtcatgcagacccatcaaaacatttgcgtgcgtctgatccatgctctcgatccacgcgtgggcactcagctgattcctggtgtcaccgtcttggtctacttgcctttcttccatgctttcggctttagcattactttgggttactttatggtcggtctccgcgtgattatgttccgccgttttgatcaggaggctttcttgaaagccatccaagattatgaagtccgcagtgtcatcaacgtgcctagcgtgatcctgtttttgtctaagagcccactcgtggacaagtacgacttgtcttcactgcgtgaattgtgttgcggtgccgctccactggctaaggaggtcgctgaagtggccgccaaacgcttgaatcttccagggattcgttgtggcttcggcctcaccgaatctaccagcgctaacattcactctctcggggatgagtttaagagcggctctttgggccgtgtcactccactcatggctgctaagatcgctgatcgcgaaactggtaaggctttgggcccgaaccaagtgggcgagctgtgtatcaaaggccctatggtgagcaagggttatgtcaataacgttgaagctaccaaggaggccatcgacgacgacggctggttgcattctggtgattttggatattacgacgaagatgagcatttttacgtcgtggatcgttacaaggagctgatcaaatacaagggtagccaggttgctccagctgagttggaggagattctgttgaaaaatccatgcattcgcgatgtcgctgtggtcggcattcctgatctggaggccggcgaactgccttctgctttcgttgtcaagcagcctggtaaagaaattaccgccaaagaagtgtatgattacctggctgaacgtgtgagccatactaagtacttgcgtggcggcgtgcgttttgttgactccatccctcgtaacgtaacaggcaaaattacccgcaaggagctgttgaaacaattgttggagaaggccggcggtggttccggagccacgaacttctctctgttaaagcaagcaggagacgtggaagaaaaccccggtcccatggcctcctccgaggacgtcatcaaggagttcatgcgcttcaaggtgcgcatggagggctccgtgaacggccacgagttcgagatcgagggagagggcgagggccgcccctacgagggcacccagaccgccaagctgaaggtgaccaagggcggccccctgcccttcgcctgggacatcctgtcccctcagttccagtacggctccaaggcctacgtgaagcaccccgccgacatccccgactacttgaagctgtccttccccgagggcttcaagtgggagcgcgtgatgaacttcgaggacggcggcgtggtgaccgtgacccaggactcctccctgcaggacggcgagttcatctacaaggtgaagctgcgcggcaccaacttcccctccgacggccccgtaatgcagaagaagaccatgggctgggaggcctccaccgagcggatgtaccccgaggacggcgccctgaagggcgagatcaagatgaggctgaagctgaaggacggcggccactacgacgccgaggtcaagaccacctacatggccaagaagcccgtgcagctgcccggcgcctacaagaccgacatcaagctggacatcacctcccacaacgaggactacaccatcgtggaacagtacgagcgcgccgagggccgccactccaccggcgcctaattaattaatttttatcgatctaattcaacaatgtctggagagctcggatccttctgtgagcgtatggcaaacgaaggaaaaatagttatagtagccgcactcgatgggacatttcaacgtaaaccgtttaataatattttgaatcttattccattatctgaaatggtggtaaaactaactgctgtgtgtatgaaatgctttaaggaggcttccttttctaaacgattgggtgaggaaaccgagatagaaataataggaggtaatgatatgtatcaatcggtgtgtagaaagtgttacatcgactcataatattatattttttatctaaaaaactaaaaataaacattgattaaattttaatataatacttaaaaatggatgttgtgtcgttagataaaccgtttatgtattttgaggaaattgataatgagttagattacgaaccagaaagtgcaaatgaggtcgcaaaaaaactgccgtatcaaggacagttaaaactattactaggagaattattttttcttagtaagttacagcgacacggtatattagatggtgccaccgtagtgtatataggatctgctcccggtacacatatacgttatttgagagatcatttctataatttaggagtgatcatcaaatggatgctaattgacggccgccatcatgatcctattttaaatggattgcgtgatgtgactctagtgactcggttcgttgatgaggaatatctacgatccatcaaaaaacaactgcatccttctaagattattttaatttctgatgtgagatccaaacgaggaggaaatgaacctagtacggcggatttactaagtaattacgctctacaaaatgtcatgattagtattttaaaccccgtggcgtctagtcttaaatggagatgcccgtttccagatcaatggatcaaggacttttatatcccacacggtaataaaatgttacaaccttttgctccttcatattcagctgaaatgagattattaagtatttataccggtgagaacatgagactgactcgagttaccaaattagacgctgtaaattatgaaaaaaagatgtactaccttaataagatcgtccgtaacaaagtagttgttaactttgattatcctaatcaggaatatgactattttcacatgtactttatgctgaggaccgtgtactgcaataaaacatttcctactactaaagcaaaggtactatttctacaacaatctatatttcgtttcttaaatattccaacaacatcaactgaaaaagttagtcatgaaccaatacaacgtaaaatatctagcaaaaattctatgtctaaaaacagaaatagcaagagatccgtacgcggtaataaatagaaacgtactactgagatatactaccgatatagagtataatgatttagttactttaataaccgttagacataaaattgattctatgaaaactgtgtttcaggtatttaacgaatcatccataaattatactccggttgatgatgattatggagaaccaatcattataacatcgtatcttcaaaaaggtcataacaagtttcctgtaaattttctatacatagatgtggtaatatctgacttatttcctagctttgttagactagatactacagaaactaatatagttaatagtgtactacaaacaggcgatggtaaaaagactcttcgtcttcccaaaatgttagagacggaaatagttgtcaagattctctatcgccctaatataccattaaaaattgttagatttttccgcaataacatggtaactggagtagagatagccgatagatctgttatttcagtcgctgattaatcaattagtagagatgagataagaacattataataatcaataatatatcttatatcttatatcttatatcttatatcttgtttagaaaaatgctaatattaaaatagctaacgctagtaatccaatcggaagccatttgatatctataatagggtatctaatttcctgatttaaatagcggacagctatattctcggtagctactcgtttggaatcacaaacattatttacatctaatttactatctgtaatggaaacgtttcccaatgaaatggtacaatccgatacattgcattttgttatatttttttttaaagaggctggtaacaacgcatcgcttcgtttacatggctcgtaccaacaataatagggtaatcttgtatctattcctatccgtactatgcttttatcaggataaatacatttacatcgtatatcgtctttgttagcatcacagaatgcataaatttgttcgtccgtcatgataaaaatttaaagtgtaaatataactattatttttatagttgtaataaaaagggaaatttgattgtatactttcggttctttaaaagaaactgacttgataaaaatggctgtaatctctaaggttacgtatagtctatatgatcaaaaagagattaatgctacagatattatcattagtcatgttaaaaatgacgacgatatcggtaccgttaaagatggtagactaggtgctatggatggggcattatgtaagacttgtgggaaaacggaattggaatgtttcggtcactggggtaaagtaagtatttataaaactcatatagttaagcctgaatttatttcagaaattattcgtttactgaatcatatatgtattcactgcggattattgcgttcacgagaaccgtattccgacgatattaacctaaaagagttatcgggacacgctcttaggagattaaaggataaaatattatccaagaaaaagtcatgttggaacagtgaatgtatgcaaccgtatcaaaaaattactttttcaaagaaaaaggtttgtttcgtcaacaagttggatgatattaacgttcctaattctctcatctatcaaaagttaatttctattcatgaaaagttttggccattattagaaattcatcaatatccagctaacttattttatacagactactttcccatccctccgttgattattagaccggctattagtttttggatagatagtatacccaaagagaccaatgaattaacttacttattaggtatgatcgttaagaattgtaacttgaatgctgatgaacaggttatccagaaggcggtaatagaatacgatgatattaaaattatttctaataacactaccagtatcaatttatcatatattacatccggcaaaaataatatgattagaagttatatcgtcgcccgacgaaaagatcagaccgctagatctgtaattggtcccagtacatctatcaccgttaatgaggtaggaatgcccgcatatattagaaatacacttacagaaaagatatttgttaatgcctttacagtggataaagttaaacaactattagcgtcaaaccaagttaaattttactttaataaacgattaaaccaattaacaagaatacgccaaggaaagtttattaaaaataaaatacatttattgcctggtgattgggtagaagtagctgttcaagaatatacaagtattatttttggaagacagccgtctctacatagatacaacgtcatcgcttcatctatcagagctaccgaaggagatactatcaaaatatctcccggaattgccaactctcaaaatgctgatttcgacggggatgaggaatggatgatattagaacaaaatcctaaagctgtaattgaacaaagtattcttatgtatccgacgacgttactcaaacacgatattcatggagcccccgtttatggatctattcaagatgaaatcgtagcagcgtattcattgtttaggatacaagatctttgtttagatgaagtattgaacatcttggggaaatatggaagagagttcgatcctaaaggtaaatgtaaattcagcggtaaagatatctatacttacttgataggtgaaaagattaattatccgggtctcttaaaggatggtgaaattattgcaaacgacgtagatagtaattttgttgtggctatgaggcatctgtcattggctggactcttatccgatcataagtcgaacgtggaaggtatcaactttattatcaagtcatcttatgtttttaagagatatctatctatttacggttttggggtgacattcaaagatctgagaccaaattcgacgttcactaataaattggaggccatcaacgtagaaaaaatagaacttatcaaagaagcatacgccaaatatctcaacgatgtaagagacgggaaaatagttccattatctaaagctttagaggcggactatgtggaatccatgttatccaacttgacaaatcttaatatccgagagatagaagaacatatgagacaaacgctgatagatgatccagataataacctcctgaaaatggccaaagcgggttataaagtaaatcccacagaactaatgtatattctaggtacgtatggacaacaaaggattgatggtgaaccagcagagactcgagtattgggtagagttttaccttactatcttccagactctaaggatccagaaggaagaggttacattcttaattctttaacaaaaggattaacgggttctcaatattacttttcgatgctggttgccagatctcaatctactgatatcgtctgtgaaacatcacgtaccggaacactggctagaaaaatcattaaaaagatggaggatatggtggtcgacggatacggacaagtagttataggtaatacgctcatcaagtacgccgccaattataccaaaattctaggctcagtatgtaaacctgtagatcttatctatccagatgagtccatgacttggtatttggaaattagtgctctgtggaataaaataaaacagggattcgtttactctcagaaacagaaacttgcaaagaagacattggcgccgtttaatttcctagtattcgtcaaacccaccactgaggataatgctattaaggttaaggatctgtacgatatgattcataacgtcattgatgatgtgagagagaaatacttctttacggtatctaatatagattttatggagtatatattcttgacgcatcttaatccttctagaattagaattacaaaagaaacggctatcactatctttgaaaagttctatgaaaaactcaattatactctaggtggtggaactcctattggaattatttctgcacaggtattgtctgagaagtttacacaacaagccctgtccagttttcacactactgaaaaaagtggtgccgtcaaacaaaaacttggtttcaacgagtttaataacttgactaatttgagtaagaataagaccgaaattatcactctggtatccgatgatatctctaaacttcaatctgttaagattaatttcgaatttgtatgtttgggagaattaaatccaaacatcactcttcgaaaagaaacagataaatatgtagtagatataatagtcaatagattatacatcaagagagcagaaataaccgaattagtcgtcgaatatatgattgaacgatttatctcctttagcgtcattgtaaaggaatggggtatggagacattcattgaggacgaggataatattagatttactgtctacctaaatttcgttgaaccggaagaattgaatcttagtaagtttatgatggttcttccgggggcagccaacaagggaaagattagtaaattcaagattcctatctctgattatacgggatatgacgacttcaatcaaacaaaaaagctcaataagatgactgtagaactcatgaatctaaaagaattgggttctttcgatttggaaaacgtcaacgtgtatcctggagtatggaatacatacgatatcttcggtatcgaggccgctcgtgaatacttgtgcgaagccatgttaaacacctatggagaagggttcgattatctgtatcagccttgtgatcttctcgctagtttactatgtgctagttacgaaccagaatcagtgaataaattcaagttcggcgcagctagtactcttaagagagctacgttcggagacaataaagcattgttaaacgcggctcttcataaaaagtcagaacctattaacgataatagtagctgccacttttttagcaaggtccctaatataggaactggatattacaaatactttatcgacttgggtcttctcatgagaatggaaaggaaactatctgataagatatcttctcaaaagatcaaggaaatggaagaaacagaagacttttaattcttatcaataacatatttttctatgatctgtcttttaaacgatggattttccacaaatgcgcctctcaagtccctcatagaatgatacacgtataaaaaatatagcataggcaatgactccttatttttagacattagatatgccaaaatcatagccccgcttctatttactcccgcagcacaatgaaccaacacgggctcgtttcgttgatcacatttagataaaaaggcggttacgtcgtcaaaatatttactaatatcggtagttgtatcatctaccaacggtatatgaataatattaatattagagttaggtaatgtatatttatccatcgtcaaatttaaaacatatttgaacttaacttcagatgatggtgcatccatagcatttttataatttcccaaatacacattattggttacccttgtcattatagtgggagatttggctttgtgcatatctccagttgaacgtagtagtaagtatttatacaaacttttcttatccatttataacgtacaaatggataaaactactttatcggtaaacgcgtgtaatttagaatacgttagagaaaaggctatagtaggcgtacaagcagccaaaacatcaacacttatattctttgttattatattggcaattagtgcgctattactctggtttcagacgtctgataatccagtctttaatgaattaacgagatatatgcgaattaaaaatacggttaacgattggaaatcattaacggatagcaaaacaaaattagaaagtgatagaggtagacttctagccgctggtaaggatgatatatttgaattcaaatgtgtggatttcggcgcctattttatagctatgcgattggataagaaaacatatctgccgcaagctattaggcgaggtactggagacgcgtggatggttaaaaaggcggcaaaggtcgatccatctgctcaacaattttgtcagtatttgataaaacacaagtctaataatgttattacttgtggtaatgagatgttaaatgaattaggttatagcggttattttatgtcaccgcattggtgttccgattttagtaatatggaatagtgttagataaatgcggtaacgaatgttcctgtaaggaaccataacagcttagatttaacgttaaagatgagcataaacataataaacaaaattacaatcaaacttataacattaatatcaaacaatccaaaaaatgaaatcagtggagtagtaaacgcgtacataactcctggataacgtttagcagctgccgttcctattctagaccaaaaattcggtttcatgttttcgaaacggtattctgcaacaagtcgaggatcgtgttctacatatttggcggcattatccagtatctgcctattgatcttcatttcgttttcgattctggctatttcaaaataaaatcccgatgatagacctccagactttataatttcatctacgatgttcagcgccgtagtaactctaataatataggctgataagctaacatcataccctcctgtatatgtgaatatggcatgatttttgtccattacaagctcggttttaactttattgcctgtaataatttctctcatctgtaggatatctatttttttgtcatgcattgccttcaagacgggacgaagaaacgtaatatcctcaataacgttatcgttttctacaataactacatattctacctttttattttctaactcggtaaaaaaattagaatcccatagggctaaatgtctagcgatatttcttttcgtttcctctgtacacatagtgttacaaaaccctgaaaagaagtgagtatacttgtcatcatttctaatgtttcctccagtccactgtataaacgcataatccttgtaatgatctggatcatccttgactaccacaacatttcttttttctggcataacttcgttgtcctttacatcatcgaacttctgatcattaatatgctcatgaacattaggaaatgtttctgatggaggtctatcaataactggcacaacaataacaggagttttcaccgccgccatttagttattgaaattaatcatatacaactctttaatacgagttatattttcgtctatccattgtttcacattgacatatttcgacaaaaagatataaaatgcgtattccaatgcttctctgtttaatgaattactaaaatatacaaacacgtcactgtctggcaataaatgatatcttagaatattgtaacaatttattttgtattgcacatgttcgtgatctatgagttcttcttcgaatggcataggatctccgaatctgaaaacgtataaataggagttagaataataatatttgagagtattggtaatatataaactctttagcggtataattagtttttttctctcaatttctatttttagatgtgatggaaaaatgactaattttgtagcattagtatcatgaactctaatcaaaatcttaatatcttcgtcacacgttagctctttgaagtttttaagagatgcatcagttggttctacagatggagtaggtgcaacaattttttgttctacacatgtatgtactggagccattgttttaactataatggtgcttgtatcgaaaaactttaatgcagatagcggaagctcttcgccgcgactttctacgtcgtaattgggttctaacgccgatctctgaatggatactagttttctaagttctaatgtgattctctgaaaatgtaaatccaattcctccggcattatagatgtgtatacatcggtaaataaaactatagtatccaacgatcccttctcgcaaattctagtcttaaccaaaaaatcgtatataaccacggagatggcgtatttaagagtggattcttctaccgttttgttcttggatgtcatataggaaactataaagtccgcactactgttaagaatgattactaacgcaactatatagtttaaattaagcattttggaaacataaaataactctgtagacgatacttgactttcgaataagtttgcagacaaacgaagaaagaacagacctctcttaatttcagaagaaaactttttttcgtattcctgacgtctagagtttatatcaataagaaagttaagaattagtcggttaatgttgtatttcattacccaagtttgagatttcataatattatcaaaagacatgataatattaaagataaagcgctgactatgaacgaaatagctatatggttcgctcaagaatatagtcttgttaaacgtggaaacgataactgtatttttaatcacgtcagcggcatctaaattaaatataggtatatttattccacacactctacaatatgccacaccatcttcataataaataaattcgttagcaaaattattaattttagtgaaatagttagcgtcaactttcatagcttccttcaatctaatttgatgctcacacggtgcgaattccactctaacatcccttttccatgcctcaggttcatcgatctctataatatctagttttttgcgtttcacaaacacaggctcgtctctcgcgatgagatctgtatagtaactatgtaaatgataactagatagaaagatgtagctatatagatgacgatcctttaagagaggtataataactttaccccaatcagatagactgttgttatggtcttcggaaaaagaatttttataaatttttccagtattttccaaatatacgtacttaacatctaaaaaatccttaatgataataggaatggataatccgtctattttataaagaaatacatatcgcacattatacttttttttggaaatgggaataccgatgtgtctacataaatatgcaaagtctaaatattttttagagaatcttagttggtccaaattcttttccaagtacggtaatagatttttcatattgaacggtatcttcttaatctctggttctagttccgcattaaatgatgaaactaagtcactatttttataactaacgattacatcacctctaacatcatcatttaccagaatactgatcttcttttgtcgtaaatacatgtctaatgtgttaaaaaaaagatcatacaagttatacgtcatttcatctgtggtattcttgtcattgaaggataaactcgtactaatctcttctttaacagcctgttcaaatttatatcctatatacgaaaaaatagcaaccagtgtttgatcatccgcgtcaatattctgttctatcgtagtgtataacaatcgtatatcttcttctgtgatagtcgatacgttataaaggttgataacgaaaatatttttatttcgtgaaataaagtcatcgtaggattttggacttatattcgcgtctagtagatatgcttttatttttggaatgatctcaattagaatagtctctttagagtccatttaaagttacaaacaactaggaaattggtttatgatgtataatttttttagtttttatagattctttattctatacttaaaaaatgaaaataaatacaaaggttcttgagggttgtgttaaattgaaagcgagaaataatcataaattatttcattatcgcgatatccgttaagtttgtatcgtaatggcgtggtcaattacgaataaagcggatactagtagcttcacaaagatggctgaaatcagagctcatctaaaaaatagcgctgaaaataaagataaaaacgaggatattttcccggaagatgtaataattccatctactaagcccaaaaccaaacgagccactactcctcgtaaaccagcggctactaaaagatcaaccaaaaaggaggaagtggaagaagaagtagttatagaggaatatcatcaaacaactgaaaaaaattctccatctcctggagtcagcgacattgtagaaagcgtggccgctgtagagctcgatgatagcgacggggatgatgaacctatggtacaagttgaagctggtaaagtaaatcatagtgctagaagcgatctctctgacctaaaggtggctaccgacaatatcgttaaagatcttaagaaaattattactagaatctctgcagtatcgacggttctagaggatgttcaagcagctggtatctctagacaatttacttctatgactaaagctattacaacactatctgatctagtcaccgagggaaaatctaaagttgttcgtaaaaaagttaaaacttgtaagaagtaaatgcgtgcacttttttataaagatggtaaactctttaccgataataattttttaaatcctgtatcagacgataatccagcgtatgaggttttgcaacatgttaaaattcctactcatttaacagatgtagtagtatatgaacaaacgtgggaggaggcgttaactagattaatttttgtgggaagtgattcaaaaggacgtagacaatacttttacggaaaaatgcatgtacagaatcgcaacgctaaaagagatcgtatttttgttagagtatataacgttatgaaacgaattaattgttttataaacaaaaatataaagaaatcgtccacagattccaattatcagttggcggtttttatgttaatggaaactatgttttttattagatttggtaaaatgaaatatcttaaggagaatgaaacagtagggttattaacactaaaaaataaacacatagaaataagtcccgatgaaatagttatcaagtttgtaggaaaggacaaagtttcacatgaatttgttgttcataagtctaatagactatataaaccgctattgaaactgacggatgattctagtcccgaagaatttctgttcaacaaactaagtgaacgaaaggtatacgaatgtatcaaacagtttggtattagaatcaaggatctccgaacgtatggagtcaattatacgtttttatataatttttggacaaatgtaaagtccatatctcctcttccgtcaccaaaaaagttaatagcattaactatcaaacaaactgctgaagtggtaggtcatactccatcaatttcaaaaagagcttatatggcaacgactattttagaaatggtaaaggataaaaattttttagatgtagtatctaaaactacgttcgatgaattcctatctatagtcgtagatcacgttaaatcatctacggatggatgatatagatctttacacaaataattacaagaccgataaatggaaatggataagcgtatgaaatctctcgcaatgacagctttcttcggagagctaagcacattagatattatggcattgataatgtctatatttaaacgccatccaaacaataccattttttcagtggataaggatggtcagtttatgattgatttcgaatacgataattataaggcttctcaatatttggatctgaccctcactccgatatctggagatgaatgcaagactcacgcatcgagtatagccgaacaattggcgtgtgcggatattattaaagaggatattagcgaatatatcaaaactactccccgtcttaaacgatttataaaaaaataccgcaatagatcagatactcgtatcagtcgagatacagaaaagcttaaaatagctctagctaaaggcatagattacgaatatataaaagacgcttgttaataagtaaatgaaaaaaaactagtcgtttataataaaacacgatatggatgccaacgtagtatcattttctactattgcgacgtatatagacgctttagcgaagaatgcttcggaattagaacagaggtctaccgcatacgaaataaataatgaattggaactagtatttattaagccgccattgattactttgacaaatgtagtgaatatctctacgattcaggaatcgtttattcgatttaccgttactaataaggaaggtgttaaaattagaactaagattccattatctaaggtacatggtctagatgtaaaaaatgtacagttagtagatgctatagataacatagtttgggaaaagaaatcattagtgacggaaaatcgtcttcacaaagaatgcttgttgagactatcgacagaggaacgtcatatatttttggattacaagaaatatggatcctctatccgactagaattagtcaatcttattcaagcaaaaacaaaaaactttacgatagactttaagctaaaatattttctaggatccggtgcccagtctaaaagttctttgttgcacgctattaatcatccaaagtcaaggcctaatacatctctggaaatagaattcacacctagagacaatgaaacagttccatatgatgaactaataaaggaattgacgactctctcgcgtcatatatttatggcttctccagagaatgtaattctttctccgcctattaacgcgcctataaaaacctttatgttgcctaaacaagatatagtaggtttggatctggaaaatctatatgccgtaactaagactgacggcattcctataactatcagagttacatcaaacgggttgtattgttattttacacatcttggttatattattagatatcctgttaagagaataatagattccgaagtagtagtctttggtgaggcagttaaggataagaactggaccgtatatctcattaagctaatagagcctgtgaatgcaatcaatgatagactagaagaaagtaagtatgttgaatctaaactagtggatatttgtgatcggatagtattcaagtcaaagaaatacgaaggtccgtttactacaactagtgaagtcgtcgatatgttatctacatatttaccaaagcaaccagaaggtgttattctgttctattcaaagggacctaaatctaacattgattttaaaattaaaaaggaaaatactatagaccaaactgcaaatgtagtatttaggtacatgtccagtgaaccaattatctttggagaatcgtctatctttgtagagtataagaaatttagcaacgataaaggctttcctaaagaatatggttctggtaagattgtgttatataacggcgttaattatctaaataatatctattgtttggaatatattaatacacataatgaagtgggtattaagtccgtggttgtacctattaagtttatagcagaattcttagttaatggagaaatacttaaacctagaattgataaaaccatgaaatatattaactcagaagattattatggaaatcaacataatatcatagtcgaacatttaagagatcaaagcatcaaaataggagatatctttaacgaggataaactatcggatgtgggacatcaatacgccaataatgataaatttagattaaatccagaagttagttattttacgaataaacgaactagaggaccgttgggaattttatcaaactacgtcaagactcttcttatttctatgtattgttccaaaacatttttagacgattccaacaaacgaaaggtattggcgattgattttggaaacggtgctgacctggaaaaatacttttatggagagattgcgttattggtagcgacggatccggatgctgatgctatagctagaggaaatgaaagatacaacaaattaaactctggaattaaaaccaagtactacaaatttgactacattcaggaaactattcgatccgatacatttgtctctagtgtcagagaagtattctattttggaaagtttaatatcatcgactggcagtttgctatccattattcttttcatccgagacattatgctaccgtcatgaataacttatccgaactaactgcttctggaggcaaggtattaatcactaccatggacggagacaaattatcaaaattaacagataaaaagacttttataattcataagaatttacctagtagcgaaaactatatgtctgtagaaaaaatagctgatgatagaatagtggtatataatccatcaacaatgtctactccaatgactgaatacattatcaaaaagaacgatatagtcagagtgtttaacgaatacggatttgttcttgtagataacgttgatttcgctacaattatagaacgaagtaaaaagtttattaatggcgcatctacaatggaagatagaccgtctacaaaaaactttttcgaactaaatagaggagccattaaatgtgaaggtttagatgtcgaagacttacttagttactatgttgtttatgtcttttctaagcggtaaataataatatggtatgggttctgatctcccagttctaaatgcattaaataattccaatagagcgatttttgttcctataggaccttccaactgtggatactctgtattgttaatagatatattaatacttttgtcgggtaacagaggttctacgtcttctaaaaataaaagttttataacatctggcctgttcataaataaaaacttggcgattctatatatactcttattatcaaatctagccattgtcttatagatgtgagctactgtaggtgtaccatttgattttctttctaatactatatatttctctcgaagaagttcttgcacatcatctgggaataaaatactactgttgagtaaatcagttattttttttatatcgatattgatggacatttttatagttaaggataataagtatcccaaagtcgataacgacgataacgaagtatttatacttttaggaaatcacaatgactttatcagattaaaattaacaaaattaaaggagcatgtatttttttctgaatatattgtgactccagatacatatggatctttatgcgtcgaattaaatgggtctagttttcagcacggcggtagatatatagaggtggaggaatttatagatgctggaagacaagttagatggtgttctacatccaatcatatatctaaagatatacccgaagatatgcacactgataaatttgtcatttatgatatttatacgtttgattcgttcaagaataaacgattggtattcgtacaggtacctccgtcgttaggagatgatagtcatttgactaatccgttattgtcaccgtattatcgtaattcagtagccagacaaatggtcaatgatatgatttttaatcaagattcatttttaaaatatttattagaacatctgattagaagccactatagagtttctaaacatataacaatagttagatacaaggataccgaagaattaaatctaacgagaatatgttataatagagataagtttaaggcgtttgtattcgcttggtttaacggcgtttcggaaaatgaaaaggtactagatacgtataaaaaggtatctaatttgatataatgaattcagtgactgtatcacacgcgccatatactattacttatcacgatgattgggaaccagtaatgagtcaattggtagagttttataacgaagtagccagttggctgctacgagacgagacgtcgcctattcctgataagttctttatacagttgaaacaaccgcttagaaataaacgagtatgtgtgtgtggtatagatccgtatccgaaagatggaactggtgtaccgttcgaatcaccaaattttacaaaaaaatcaattaaggagatagcttcatctatatctagattaaccggagtaattgattataaaggttataaccttaatataatagacggggttataccctggaattattacttaagttgtaaattaggagaaacaaaaagtcacgcgatttactgggataagatttccaagttactgctgcagcatataactaaacacgttagtgttctttattgtttgggtaaaacagatttctcgaatatacgggccaagttagaatccccggtaactaccatagtcggatatcatccagcggctagagaccgccaattcgagaaagatagatcatttgaaattatcaacgttttactggaattagacaacaaggcacctataaattgggctcaagggtttatttattaatgctttagtgaaattttaacttgtgttctaaatggatgcggctattagaggtaatgatgttatctttgttcttaagactataggtgtcccgtcagcgtgcagacaaaatgaagatccaagatttgtagaagcatttaaatgcgacgagttagaaagatatattgagaataatccagaatgtacactattcgaaagtcttagggatgaggaagcatactctatagtcagaattttcatggatgtagatttagacgcgtgtctagacgaaatagattatttaacggccattcaagattttattatcgaggtgtcaaactgtgtagctagattcgcgtttacagaatgcggcgccattcatgaaaatgtaataaaatccatgagatctaatttttcattgactaagtctacaaatagagataaaacaagttttcatattatctttttagatacgtataccactatggatacattgatagctatgaaacgaacactattagaattaagtagatcatctgaaaatccactaaccagatcgatagacactgccgtatataggagaaaaacaactcttcgggttgtaggtactaggaaaaatccaaattgcgacactattcatgtaatgcaaccaccgcatgataatatagaagattacctattcacttacgtggatatgaacaacaatagttattacttttctctacaacaacgattggaggatttagttcctgataagttatgggaaccagggtttatttcattcgaagacgctataaaaagagtttcaaaaatattcattaattctataataaactttaatgatctcgatgaaaataattttacaacggtaccactggtcatagattacgtaacaccttgtgcattatgtaaaaaacgatcgcataaacatccgcatcaactatcgttggaaaatggtgctattagaatttacaaaactggtaatccacatagttgtaaagttaaaattgttccgttggatggtaataaactgtttaatattgcacaaagaattttagacactaactctgttttattaaccgaacgaggagaccatatagtttggattaataattcatggaaatttaacagcgaagaacccttgataacaaaactaattttgtcaataagacatcaactacctaaggaatattcaagcgaattactctgtccaagaaaacgaaagactgtagaagctaacatacgagacatgttagtagattcagtggagaccgatacctatccggataaacttccgtttaaaaatggtgtattggacctggtagacggaatgttttactctggagatgatgctaaaaaatatacgtgtactgtatcaaccggatttaaatttgacgatacaaagttcgtcgaagacagtccagaaatggaagagttaatgaatatcattaacgatatccaaccattaacggatgaaaataagaaaaatagagagctatatgaaaaaacattatctagttgtttatgcggtgctaccaaaggatgtttaacattcttttttggagaaactgcaactggaaagtcgacaaccaaacgtttgttaaagtctgctatcggtgacctgtttgttgagacgggtcaaacaattttaacagatgtattggataaaggacctaatccatttatcgctaacatgcatttgaaaagatctgtattctgtagcgaactacctgattttgcctgtagtggatcaaagaaaattagatctgacaatattaaaaagttgacagaaccttgtgtcattggaagaccgtgtttctccaataaaattaataatagaaaccatgcgacaatcattatcgatactaattacaaacctgtttttgataggatagataacgcattaatgagaagaattgccgtcgtgcgattcagaacacacttttctcaaccttctggtagagaggctgctgaaaataatgacgcgtacgataaagtcaaactattagacgaggggttagatggtaaaatacaaaataatatatatagatttgcatttctatacttgttggtgaaatggtacaaaaaatatcatgttcctattatgaaactatatcctacacccgaagagattcctgactttgcattctatctcaaaataggtactctgttggtatctagctctgtaaagcatattccattaatgacggacctctccaaaaagggatatatattgtacgataatgtggtcactcttccgttgactactttccaacagaaaatatccaagtattttaattctagactatttggacacgatatagagagcttcatcaatagacataagaaatttgccaatgttagtgatgaatatctgcaatatatattcatagaggatatttcatctccgtaaatatatgctcatatatttatagaagatatcacatatctaaatgaataccggaatcatagatttatttgataatcatgttgatagtataccaactatattacctcatcagttagctactctagattatctagttagaactatcatagatgagaacagaagcgtgttattgttccatattatgggatcaggtaaaacaataatcgctttgttgttcgccttggtagcttccagatttaaaaaggtttacattctagtgccgaacatcaacatcttaaaaattttcaattataatatgggtgtagctatgaacttgtttaatgacgaattcatagctgagaatatctttattcattccacaacaagtttttattctcttaattataacgataacgtcattaattataacggattatctcgctacaataactctatttttatcgttgatgaggcacataatatctttgggaataatactggagaacttatgaccgtgataaaaaataaaaacaagattccttttttactattgtctggatctcccattactaacacacctaatactctgggtcatattatagatttaatgtccgaagagacgatagattttggtgaaattattagtcgtggtaagaaagtaattcagacacttcttaacgaacgcggtgtgaatgtacttaaggatttgcttaaaggaagaatatcatattacgaaatgcctgataaagatctaccaacgataagatatcacggacgtaagtttctagatactagagtagtatattgtcacatgtctaaacttcaagagagagattatatgattactagacgacagctatgttatcatgaaatgtttgataaaaatatgtataacgtgtcaatggcagtattgggacaacttaatctgatgaataatttagatactttatttcaggaacaggataaggaattgtacccaaatctgaaaataaataatggcgtgttatacggagaagaattggtaacgttaaacattagttccaaatttaaatactttattaatcggatacagacactcaacggaaaacattttatatacttttctaattctacatatggcggattggtaattaaatatatcatgctcagtaatggatattctgaatataatggttctcagggaactaatccacatatgataaacggcaaaccaaaaacatttgctatcgttactagtaaaatgaaatcgtctttagaggatctattagatgtgtataattctcctgaaaacgatgatggtagtcaattgatgtttttgttttcatcaaacattatgtccgaatcctatactctaaaagaggtaaggcatatttggtttatgactatcccagatactttttctcaatacaaccaaattcttggacgatctattagaaaattctcttacgccgatatttctgaaccagttaatgtatatcttttagccgccgtatattccgatttcaatgacgaagtgacgtcattaaacgattacacacaggatgaattaattaatgttttaccatttgacatcaaaaagctgttgtatctaaaatttaagacgaaagaaacgaatagaatatactctattcttcaagagatgtctgaaacgtattctcttccaccacatccatcaattgtaaaagttttattgggagaattggtcagacaatttttttataataattctcgtattaagtataacgataccaagttacttaaaatggttacatcagttataaaaaataaagaagacgctaggaattacatagatgatattgtaaacggtcacttctttgtatcgaataaagtatttgataaatctcttttatacaaatacgaaaacgatattattacagtaccgtttagactttcctacgaaccatttgtttggggagttaactttcgtaaagaatataacgtggtatcttctccataaaactgatgagatatataaagaaataaatgtcgagctttgttaccaatggatacctttccgttacattggaaccacacgagctgacgttagacataaaaactaatattaggaatgccgtatataagacgtatctccatagagaaattagtggtaaaatggccaagaaaatagaaattcgtgaagacgtggaattacctctcggcgaaatagttaataattctgtagttataaacgttccgtgtgtaataacctacgcgtattatcacgttggggatatagtcagaggaacattaaacatcgaagatgaatcaaatgtaactattcaatgtggagatttaatctgtaaactaagtagagattcgggtactgtatcatttagcgattcaaagtactgcttttttcgaaatggtaatgcgtatgacaatggcagcgaagtcactgccgttctaatggaggctcaacaaggtatcgaatctagttttgtttttctcgcgaatatcgtcgactcataaaaaagagaatagcggtaagtataaacacgaatactatggcaataattgcgaatgttttattctcttcgatatatttttgataatatgaaaaacatgtctctctcaaatcggacaaccatctcataaaatagttctcgcgcgctggagaggtagttgccgctcgtataatctctccagaataatatacttgcgtgtcgtcgttcaatttatacggatttctatagttctctgttatataatgcggtttgccctcatgattagacgacgacaatagtgttctaaatttagatagttgatcagaatgaatgtttattggcgttggaaaaattatccatacagcgtctgcagagtggttgatagttgttcctagatatgtaaaataatccaacttactaggcagcaaattgtctagataaaatactgaatcaaacggtgcagacgtattggcggatctaatggaatccaattgattaactatcttttgaaaatatacatttttatgatccaatacttgtaagaatatagaaataatgataagtccatcatcgtgtttttttgcctcttcataagaactatattttttcttattccaatgaacaagattaatctctccagagtatttgtacacatctatcaagtgattggatccataatcgtcttcctttccccaatatatatgtagtgatgataacacatattcattggggagaaaccctccacttatatatcctcctttaaaattaatccttactagttttccagtgttctggatagtggttggtttcgactcattataatgtatgtctaacggcttcaatcgcgcgttagaaattgcttttttagtttctatattaataggagatagttgttgcggcatagtaaaaatgaaatgataactgtttaaaaatagctcttagtatgggaattacaatggatgaggaagtgatatttgaaactcctagagaattaatatctattaaacgaataaaagatattccaagatcaaaagacacgcatgtgtttgctgcgtgtataacaagtgacggatatccgttaataggagctagaagaacttcattcgcgttccaggcgatattatctcaacaaaattcagattctatctttagagtatccactaaactattacggtttatgtactacaatgaactaagagaaatctttagacggttgagaaaaggttctatcaacaatatcgatcctcactttgaagagttaatattattgggtggtaaactagataaaaaggaatctattaaagattgtttaagaagagaattaaaagaggaaagtgatgaacgtataacagtaaaagaatttggaaatgtaattctaaaacttacaacacgggataaattatttaataaagtatatataagttattgcatggcgtgttttattaatcaatcgttggaggatttatcgcatactagtatttacaatgtagaaattagaaagattaaatcattaaatgattgtattaacgacgataaatacgaatatctgtcttatatttataatatgctagttaatagtaaatgaacttttacagatctagtataattagtcagattattaagtataatagacgactagctaagtctattatttgcgaggatgactctcaaattattacactcacggcattcgttaaccaatgcctatggtgtcataaacgagtatccgtgtccgctattttattaactactgataacaaaatattagtatgtaacagacgagatagttttctctattctgaaataattagaactagaaacatgtttagaaagaaacgattatttctgaattattccaattatttgaacaaacaggaaagaagtatactatcgtcatttttttctctagatccagctactactgataatgatagaatagacgctatttatccgggtggcatacccaaaaggggtgagaatgttccagagtgtttatccagggaaattaaagaagaagttaatatagacaattcttttgtattcatagacactcggttttttattcatggcatcatagaagataccattattaataaattttttgaggtaatcttctttgtcggaagaatatctctaacgagtgatcaaatcattgatacatttaaaagtaatcatgaaatcaaggatctaatatttttagatccgaattcaggtaatggactccaatacgaaattgcaaaatatgctctagatactgcaaaacttaaatgttacggccatagaggatgttattatgaatcattaaaaaaattaactgaggatgattgattaaaaaatataaattaatttaccatcgtgtatttttataacgggattgtccggcatatcatgtagatagttaccgtctacatcgtatactcgaccatctacgcctttaaatcctctatttattgacattaatctattagaattggaataccaaatattagtaccctcaattagtttattggtaatattttttttagacgatagatcgatggctcttgaaaccaaggttttccaaccggactcattgtcgatcggtgagaagtctttttcattagcatgaatccattctaatgatgtatgtttaaacactctaaacaattggacaaattcttttgatttgctttgaatgatttcaaataggtcttcgtctacagtaggcataccattagataatctagccattataaagtgcacgtttacatatctacgttctggaggagtaagaacgtgactattgagacgaatggctcttcctactatctgacgaagagacgcctcgttccatgtcatatctaaaatgaagatatcattaattgagaaaaaactaataccctcgcctccactagaagagaatacgcatgttttaatgcattctccgttagtgtttgattcttggttaaactcagccaccgccttgattctagtatcttttgttctagatgagaactctatattagagataccaaagactttgaaatatagtaataagatttctattcctgactgattaacaaatggttcaaagactagacatttaccatgggatgctaatattcccaaacatacatctataaatttgacgcttttctcttttaattcagtaaatagagagatatcagccgcactagcatcccctttcaatagttctccctttttaaaggtatctaatgcggatttagaaaactctctatctcttaatgaatttttaaaatcattatatagtgttgctatctcttgcgcgtattcgcccggatcacgattttgtctttcaggaaagctatcgaacgtaaacgtagtagccatacgtctcagaattctaaatgatgatatacctgtttttatttcagcgagtttagccttttgataaatttcttcttgctttttcgacatattaacgtatcgcattaatactgttttcttagcgaatgatgcagacccttctacgtcatcaaaaatagaaaactcgttattaactatatacgaacatagtcctcctagtttggagactaattctttttcatcgactagacgtttattctcaaatagcgattggtgttgtaaggatcctggtcgtagtaagttaaccaacatggtgaattcttgcacactattgacgataggtgtagccgataaacaaatcatcttatggttttttaacgcaatggtcttagataaaaaattatatactgaacgagtaggacggatcttaccatcttctttgattaatgatttagaaatgaagttatgacattcatcaataatgacgcatattctactcttggaattaatagttttgatattagtaaaaaatttatttctaaaattttgatcatcgtaattaataaaaatacaatccttcgttatctctggagcgtatctgagtatagtgttcatccaaggatcttctatcaaagcctttttcaccaataagataatagcccaattcgtataaatatccttaagatgtttgagaatatatacagtagtcattgttttaccgacacccgtttcatggaacaataaaagagaatgcatactgtctaatcctaagaaaactcttgctacaaaatgttgataatccttgaggcgtactacgtccgaccccatcatttcaacgggcatattagtagttctgcgtaaggcataatcgatataggccgcgtgtgatttactcatttatgagtgataagtaataactatgttttaaaaatcacagcagtagtttaactagtcttctctgatgtttgttttcgatactttttgaatcagaagtcatactagaataaagcaacgagtgaacgtaatagagagcttcgtatactctattcgaaaactctaagaacttattaatgaattccgtatccactggattgtttaaaatactaaattgaacactgttcacatccttccaagaagaagacttagtgacggacttaacatgagacataaataaatccaaattttttttacaaacatcactagccaccataatggcgctatctttcaaccagctatcgcttacgcattttagcagtctaacatttttaaagagactacaatatattctcatagtatcgattacacctctaccgaataaagttggaagtttaataatacaatatttttcgtttacaaaatcaaataatggtcgaaacacgtcgaaggttaacatcttataatcgctaatgtatagattgttttcagtgagatgattattagatttaatagcatctcgttcacgtttgaacagtttattgcgtgcgctgaggtcggcaactacggcgtccgctttagtactcctcccataatactttacgctattaatctttaaaatttcatagactttatctagatcgctttctggtaacatgatatcatgtgtaaaaagttttaacatgtcggtcggcattctatttagatcattaactctagaaatctgaagaaagtaattagctccgtattccagactaggtaatgggcttttacctagagacagattaagttctggcaatgtttcataaaatggaagaaggacatgcgttccctcccggatattttttacaatttcatccatttacaactctatagtttgttttcattattattagttattatctcccataatcttggtaatacttaccccttgatcgtaagataccttatacaggtcattacatacaactaccaattgtttttgtacataatagattggatggttgacatccatggtggaataaactactcgaacagatagtttatctttccccctagatacattagccgtaatagttgtcggcctaaagaatatctttggtgtaaagttaaaagttagggttcttgttccattattgctttttgtcagtagttcattataaattctcgagatgggtccgttctctgaatatagaacatcatttccaaatctaacttctagtctagaaataatatcggtcttattcttaaaatctattcccttgatgaagggatcgttaatgaacaaatccttggcctttgattcggctgatctattatctccgttatagacgttacgttgactagtccaaagacttacaggaatagatgtatcgatgatgttgatactatgtgatatgtgagcaaagattgttctcttagtggcatcactatatgttccagtaatggcggaaaactttttagaaatgttatatataaaagaattttttcgtgttccaaacattagcagattagtatgaagataaacactcatattatcaggaacattatcaatttttacatacacatcagcatcttgaatagaaacgataccatcttctggaacctctacgatctcggcagactccggataaccagtcggtgggccatcgctaacaataactagatcatccaacaatctactcacatatgcatctatataatctttttcatcttgtgagtaccctggatacgaaataaatttattatccgtatttccataataaggtttagtataaacagagagagatgttgccgcatgaacttcagttacagtcgccgttggttggtttatttgacctattactctcctaggtttctctataaacgatggtttaatttgtacattcttaaccatatatccaataaagctcaattcaggaacataaacaaattctttgttgaacgtttcaaagtcgaacgaagagtcacgaataacgatatcggatactggattgaaggttaccgttacggtaatttttgaatcggatagtttaagactgctgaatgtatcttccacatcaaacggagttttaatataaacgtatactgtagatggttctttaatagtgtcattaggagttaggccaatagaaatatcattaagttcactagaatatccagagtgtttcaaagcaattgtattattgatacaattattatataattcttcgccctcaatttcccaaataacaccgttacacgaagagatagatacgtgattaatacatttatatccaacatatggtacgtaactgaatcttcccatacctttaacttctggaagttccaaactcagaaccaaatgattaagcgcagtaatatactgatccctaatttcgaagctagcgatagcctgattgtctggaccatcgtttgtcataactccggatagagaaatatattgcggcatatacaaagttggaatttgactatcgactgcgaagacattagaccgtttaatagagtcatccccaccgatcaaagaattaatgatagtattattcattttctatttaaaatggaaaaagcttacaataaactccgtagagaaatatctataatttgtgagttttccttaaagtaacagcttccgtaaacgccgtctttatctcttagtaggtttattgtatttatgaccttttccttatcttcatagaatactaaaggcaacaaagaaatttttggttcttctctaagagctacgtgagacttaaccatagaagccaacgaatccctacatattttagaacagaaataccctacttcaccacccttgtatgtctcaatactaataggtctaaaaaccaaatcttgattacaaaaccaacacttatcaattacactatttgtcttaatagacacatctgccatagatttataatactttggtagtatacaagcgagtgcttcttctttagcgggcttaaagactgctttaggtgctgaaataaccacatctggaaggcttactcgcttagccatttaattacggaactatttttttatacttctaatgagcaagtagaaaacctctcatctacaaaaacgtactcgtgtccataatcctctaccatagttacacgttttttagatctcatatgtgctaaaaagttttcccatactaattggttactattatttttcgtataatttttaacagtttgaggttttagatttttagttacagaagtgatatcgaatattttatccaaaaagaatgaataattaattgtcttagaaggagtgttttcttggcaaaagaataccaagtgcttaaatatttctactacttcattaatcttttctgtactcagattcagtttctcatcttttacttgattgattatttcaaagactaacttataatcctttttatttattctctcgttagccttaagaaaactagatacaaaatttgcatctacatcatccgtggatatttgatttttttccatgatatccaagagttccgagataatttctccagaacattgatgagacaataatctccgcaatacatttctcaaatgaataagtttattagacacgtggaagtttgactttttttgtacctttgtacatttttgaaataccgactcgcaaaaaatacaatattcatatccttgttcagatactataccgttatgtctacaaccgctacataatcgtagattcatgttaacactctacgtatctcgtcgtccaatattttatataaaaacattttatttctagacgttgccagaaaatcctgtaatatttttagttttttgggctgtgaataaagtatcgccctaatattgttaccgtcttccgccaatatagtagttaaattatccgcacatgcagaagaacaccgcttaggcggattcagtacaatgttatatttttcgtaccaactcatttaaatatcataatctaaaatagttctgtaatatgtctagcgctaatatattgatcataatcctgtgcataaattaagatacaacaatgtctcgaaatcatcgacatggcttcttccatagttagaagatcgtcgtcaaagttagcaacgtgattcatcaacatttgctgttttgaggcagcaaatactgaaccgtcgccattcaaccattcataaaaaccatcgtctgaatccattgataatttcttgtactggtttttgagagctcgcatcaatctagcatttctagctcccggattgaaaacagaaagaggatcgtacatccagggtccattttctgtaaatagaatcgtataatgtcccttcaagaagatatcagacgatccacaatcaaagaattggtctccgagtttgtaacaaactgcggactttaacctatacatgataccgtttagcataatttctggtgatacgtcaatcggagtatcatctattagagatctaaagccggtgtaacattctccaccaaacatattcttattctgacgtcgttctacataaaacatcattgctccattaacgataacaggggaatgaacagcactacccatcacattagttcccaatggatcaatgtgtgtaactccagaacatcttccatagcctatgttaggaggagcgaacaccactcttccactattgccatcgaatgccatagaataaatatccttggaattgatagaaatcggactgtcggatgttgtgatcatcttcataggattaacaactatgtatggtgccgcctgaagtttcatatcgtaactgatgccgtttataggtctagccacagaaaccaacgtaggtctaaatccaactatagacaaaatagaagccaatatctgttcctcatctgtcataacttgagagcatccagtatgaataatcttcattagatggggatctaccgcatcatcatcgttacaataaaaaattcccattctaatgttcataattgcttttctaatcatggtatgcatgtttgctctctgaatctctgtggaaattagatctgatacacctgtaatcactatcggattatcctccgtaagacgattaaccaacaacatataattataagactttacttttctaaattcataaagttgctggattaggctataggtgtctccatgtacatacgcgttctcgagcgcaggaagtttaataccgaatagtgccatcagaataggatgaatatagtaattagtttctggttttctataaataaaagacaaatcttgtgaactagacatatcggtaaaatgcatggattggaatcgtgtagtcgacagaagaatatgatgattagatggagagtatattttatctaactctttgagttggtcaccgattctaggactagctcgagaatgaataagtactaaaggatgagtacatttcacagaaacactagcattgttcaatgtgctctttacatgggtaaggagttgaaatagctcgtttctatttgttctgacaatatttagtttattcataatgttaagcatatcctgaatagtaaagttagatgtgtcatacttgttagtagttagatatttagcaattgcattcccatcatttctcaatctcgtactccaatcatgcgtggatgctacttcgtcgatggaaaccatacaatcctttttgataggctgttgagattgatcatttcctgcacgtttaggtttggtacgttgatttctagcccctgcggatataaagtcatcgtctacaatttgggacaatgaattgcatacactacaagacaaagatttatcagaagtgtgaatatgatcttcatctaccaaagaaagagtttgattagtataactagattttagtcctgcgttagatgttaaaaaaacatcgctattgaccacggcttccattatttatattcgtagtttttactcgaaagcgtgattttaatatccaatcttattacttttggaatcgttcaaaacctttgactagttgtagaatttgatctattgccctacgcgtatactcccttgcatcatatacgttcgtcaccagatcgtttgtttcggcctgaagttggtgcatatctctttcaacattcgacatgagatccttaagggccatatcgtctagattttgttgagatgctgctcctggatttggattttgttgtgctgttgtacatactgtaccaccagtaggtgtaggagtacatacagtggccacaataggaggttgagaaagtgtaaccgttggagtagtacaagaaatacttccatccgattgttgtgtacatgtagttgttggtaacgtctgagaaggttgggtagatggcggcgtcgtcgttttttgatctttattaaatttagagataatatcctgaacagcattgctcggcgtcaacgctggaaggagtgaactcgccggcgcatcagtatcttcagacagccaatcaaaaagattagacatatcagatgatgtattagtttgttgtcgtggttttggtgtaggagcagtactactaggtagaagaataggagccgatgtagctgttggaaccggctgtggagttatatgaatagttggttgtagcggttggataggctgtctgctggcggccatcatattatctctagctagttgttctcgcaactgtctttgataatacgactcttgagactttagtcctatttcaatcgcttcatcctttttcgtatccggatccttttcttcagaataatagattgacgactttggtgtagaggattctgccagcctctgtgagaacttgttaaagaagtccatttaaggctttaaaattgaattgcgattataagattaaatggcagacacagacgatattatcgactatgaatccgatgatctcaccgaatacgaggatgatgaagaagaggaagaagatggagagtcactagaaactagtgatatagatcccaaatcttcttataagattgtagaatcagcatccactcatatagaagatgcgcattccaatcttaaacatatagggaatcatatatctgctcttaaacgacgctatactagacgtataagtctatttgaaatagcgggtataatagcagaaagctataacttgcttcaacgaggaagattacctctagtttcagaattttctgacgaaacgatgaagcaaaatatgctacatgtaattatacaagagatagaggagggttcttgtcctatagtcatcgaaaagaacggagaattgttgtcggtaaacgattttgacaaagatggtctaaaattccatctagactatattatcaaaatttggaaacttcaaaaacgatattagaatttatacgaatatcgttctctaaatgtcacaatcaagtctcgcatgttcagcaatttattgtcgtactttatatcgtgttcattaacgatatcttgcaaaatagtaatgattctatcttccttcgatagatattcttcagagattattgtcttatattctttcttgttatcagatatgaatttgataagactttgaacattattgatacccgtctgtttaattttttctacagatattttagttttggcagattctatcgtatctgtcaatagacatccaacatcgacattcgacgtcaattgtctataaatcaacgtataaattttagaaataacattagcgaattgttgtgcgttgatgtcgttattctgaaacagtatgattttaggtagcattttcttaacaaagagaacgtatttattgttactcagttgaacagatgatatatccagattactaacgcatctgattccgtataccaaactttcagaagaaatggtatacaattgtttgtattcattcaatgtctctttttcagaaattagtttagagtcgaatactgcaataattttcaagagatagttttcatcagataagattttatttagtgtagatatgataaaactattgttttgttggagaacttgatacgccgcgttctctgtagtcgacgctctcaaatgggaaacaatctccattatttttttggaatcggatactatatcttcggtatcttgacgcagtctagtatacatagagttaagagagattagagtttgtacattaagcaacatgtctctaaatgtggctacaaacttttcctttttcacatcatctagtttattatataccgatttcacaacggcaccagatttaaggaaccagaatgaaaaactctgataactacaatatttcatcatagttacgattttatcatcttctatagttggtgtaatagcgcatacctttttctccaagactggaaccaacgtcataaaaatgtttaaatcaaaatccatatcaacatctgatgcgctaagaccagtctcgcgttcaagattatctttactaatggtgacgaactcatcgtataaaactctaagtttgtccattatttatttacagatttagttgtttaatttatttgtgctcttccagagttgggatagtatttttctaacgtcggtattatattattaggatctacgttcatatgtatcataatattaatcatccacgttttgataaatctatctttagcttctgaaataacgtatttaaacaaaggagaaaaatatttagctacggcatcagacgcaataacattttttgtaaatgtaacgtatttagacgacagatcttcgttaaaaagttttccatctatgtagaatccatcggttgttaacaccattcccgcgtcagattgaataggagtttgaatagtttgttttggaaatagatccttcaataacttatagttgggtgggaaaaaatcgattttatcactagactctttcttttttactatcattacctcatgaactatttcttgaatgagtatatgtattttctttcctatatcggacgcgttcattggaaaatataccatgtcgttaactataagaatatttttatcctcgtttacaaactgaataatatcagatgtagttcgtaaacgaactatatcatcaccagcacaacatctaactatatgatatccactagtttcctttagccgtttattatcttgttccatattagcagtcattccatcatttaagaaggcgtcaaaaataatagggagaaatgacattttggattctgttacaactttaccaaaattaaggatatacggacttactatctttttctcaacgtcaatttgatgaacacacgatgaaaatgtgcttctatgagattgatcatgtagaaaacaacaagggatacaatatttccgcatatcatgaaatatattaagaaatcccaccttattatatttccccaaaggatccatgcacgtaaacattatgccgttatcattaataaagacttctttctcatcggatctgtaaaagttgttactgatttttttcattccaggatctagataattaataatgatgggttttctattcttattctttgtattttggcatatcctagaccagtaaacagtttccactttggtaaaatcagcagacttttgaacgctattaaacatggcattaatggcaataactaaaaatgtaaaatatttttctatgttaggaatatggtttttcactttaatagatatatggtttttggccaaaatgatagatatttttttatccgaggatagtaaaatattattagtcgccgtctctataaaaatgaagctagtctcgatatccaattttattctagaattgataggagtcgccaaatgtaccttatacgttatatctcccttgatgcgttccatttgtgtatctatatcggacacaagatctgtaaatagttttacgttattaatcatcacggtatcgccgtcgctagataacgctaatgtaccatccaagtcccaaatggagagatttaactgttcatcgtttagaataaaatgattaccggtcatattaataaagtgttcatcgtatctagataacaacgacttataattaatgtccaagtcttgaactcgctgaatgatcttttttaacccagttagttttagattggtacgaaatatattgttaaactttgattctacagtaatgtccaaatctagttgtggaaatacttccatcaacattgtttcaaacttgataatattattatctacatcttcgtacgatccaaattccggaatagatgtatcgcacgctctggccacccagataaccaaaaagtcacacgctccaggatatacattgtataaaaagctatcgttttttagtagggtttttttctgcgtgtatacgaagggattaaaaatagtattatcaacgtaactatattccaaattattcttatgagaatagataataatatcgtccttaatatctaacaaatttcctaaatatccctttaattgagtcattcgaagcgtcaatagaatatgtctcttaactatttccggctgttgtatatttaaatgacttcgtaaaaaataatatatgggcgacttctcatctatgtaatcatatggagtgagatatagggctcgttctacctcctgccccttacccacctgtaataccaattgcggacttactatatatcgcatatttatatcgtggggtaaagtgaaaatctactaccgatgatgtaagtcttacaatgttcgaaccagtaccagatcttaatttggaggcctccgtagaactaggggaggtaaatatagatcaaacaacacctatgataaaggagaatagcggttttatatcccgcagtagacgtctattcgcccatagatctaaggatgatgagagaaaactagcactacgattctttttacaaagactttattttttagatcatagagagattcattatttgttcagatgcgttgacgctgtaaaagacgtcactattaccaaaaaaaataacattatcgtggcgccttatatagcacttttaactatcgcatcaaaaggatgcaaacttacagaaacaatgattgaagcattctttccagaactatataatgaacatagtaagaaatttaaattcaactctcaagtatccatcatccaagaaaaactcggataccagtttggaaactatcacgtttatgattttgaaccgtattactctacagtagctctggctattcgagatgaacattcatctggcatttttaatatccgtcaagagagttatctggtaagttcattatctgaaataacatatagattttatctaattaatctaaaatctgatcttgttcaatggagtgctagtacgggcgctgtaattaatcaaatggtaaatactgtattgattacagtgtatgaaaagttacaactggtcatagaaaatgattcacaatttacatgttcattggctgtggaatcaaaacttccaataaaattacttaaagatagaaatgaattatttacaaaattcattaacgagttaaaaaagaccagttcattcaagataagcaaacgcgataaggatacgctactaaaatattttacttaggactggagttagaatttatagacgactcatttcgtttatcattgttactattattactattactatcattattagtgttggcattattagtattcttcttgtcatcttgttcagaaatatacagcaatgctatacctaatactaaatacattatcatgctcgcaatggctctaacaacaacgaaccaaaatgaatttggtcgtagcttttgttcacaaaaatacataaagaaatgtctacataaatctatggcgccattggctacttgaaatagcgccagtcctcctacagattttaatatagctgtataacatgacatttattcatcatcaaaagagacagagtcaccatctgtcatatttagattttttttcatgtgttcaaagtatcctctactcatttcattataatagtttatcatacttagaattttaggacggatcaatgagtaagacttgactagatcgtcagtagtaatttgtgcatcgtctattctgcatccgcttcgtcgaataatgtatagcatcgctttgagattctccatagctatcaagtctttatacaatgacatggaaatatctgtgaatactttatacttctccaacatcgatgccttaacatcatcgcctactttagcattgaaaatacgttctattgtgtagatggatgtagcaagatttttaaacaacaatgccatcttacacgatgattgcctcaagtctccaatcgtttgtttagaacgattagctacagagtccaatgcttggctgactagcatattattatctttagaaattgtattcttcaatgaggcgtttatcatatctgtgatttcgttagtcatattacagtctgactgggttgtaatgttatccaacatatcacctatggatacggtacacgtaccagcatttgtaataatcctatctaagatgttgtatggcattgcgcagaaaatatcttctcctgtaatatctccactctcgataaatctactcagattattcttaaatgccttattctctggagaaaagatatcagtgtccatcatttcattaatagtatacgcagaaaagataccacgagtatcaattctatccaagatacttatcggttccgagtcacagataatggtttcctctccttcgggagatcctgcatagaaatatctaggacaatagtttctatactgtctgtaactctgataatctctaaagtcactaactgataccatgaaattgagaagatcaaacgctgaagtaattaatttttctgcctcgtttttactacaactagttttcatcaatgtagtgacgatgtattgtttagttacttttggtctaatactgatgatagagatattattgcttcccataatggatcttctagtagtcaccttaaagcccattgatgcgaatagcagatagataaagtcttggtatgactcctttctaatatagtacggactacctttgtcacccaactttatacccacataagccataacaacctctttaatagccgtttcatgaggtttatcagccatgagcctgagtagttggaagaatctcatgaatcccgtctcagaaagtcctatatgcatgatagatttatctttcctgggaaactctcgtatagtcatagatgaaatactctttaaagtttctgaaataagattagtaacagtcttacctccgactactctaggtaacaaacaaactctaataggtgttttctctgcggagataatatcagaaaggatagagcaataagtagtattattgtgattataaagaccgaatacataacaggtagaatttataaacatcatgtcctgaaggtttttagacttgtattcctcgtaatccataccgtcccaaaacatggatttggtaactttgatagccgtagatctttgttccttcgccaacaggttaaagaaattaataaagaatttgttgtttctatttatgtccacaaattgcacgtttggaagcgccacggttacattcactgcagcattttgaggatcgcgagtatgaagtacgatgttattgtttactggtatatctggaaagaaatctaccagtctaggaataagagattgatatcgcatagaaatagtaaagtttataatctcatcatcgaagagcattttgttaccattgtaataaatatccactctgtcatatgtataaatgaagtactgttcaaacatgatgagatgtttatatgttggcatagtagtgagatcgacgtttggtaatggcaatgtattaagattaactccataatgtctagcagcatctgcgatgttataagcgtcgtcaaagcggggtcgatcttgtattgttatatattgtctaacacctataagattatcaaaatcttgtctgcttaatacaccgttaacaatttttgccttgaattcttttattggtgcattaataacatccttatagaggatgttaaacaaataagtgttatcaaagttaagatctggatatttcttttctgctagaacatccattgagtcggagccatctggtttaatataaccaccgataaatctagctctgtattctgtatccgtcaatctaatattaagaaggtgttgagtgaaaggtggaagatcgtaaaagctgtgagtattaatgataggattagtttccgaactaatgttaattggggtattaataatatctatatttccagcgttaagtgtaacattaaacagttttaattcacgtgacgtggtatcaattaaataattaatgcccaatttggatatagcagcctgaagctcatcttgtttagttacggatcctaatgagttattaagcaatatatcgaacggatgaacgaaggttgttttaagttggtcacatactttgtaatctagacatagatgcggaagaacggtagaaactatacgaaataaatattcagagtcctctaattgatcaagagtaactattgacttaataggcatcatttatttagtattaaatgacgaccgtaccagtgacggatatacaaaacgatttaattacagagttttcagaagataattatccatctaacaaaaattatgaaataactcttcgtcaaatgtctattctaactcacgttaacaacgtggtagatagagaacataatgccgccgtagtgtcatctccagaggaaatatcctcacaacttaatgaagatctatttccagatgatgattcaccggccactattatcgaacgagtacaacctcatactactattattgacgatactccacctcctacgtttcgtagagagttattaatatcggaacaacgtcaacaacgagaaaaaagatttaatattacagtatcgaaaaatgctgaagcaataatggaatctagatctatgataacttctatgccaacacaaacaccatccttgggagtagtttatgataaagataaaagaattcagatgttagaggatgaagtggttaatcttagaaatcaacgatctaatacaaaatcatctgataatttagataattttaccaaaatactatttggtaagactccgtacaaatcaacagaagttaataagcgtatagccatcgttaattatgcaaatttgaacgggtcccccttatcagtcgaggacttggatgtttgttcggaggatgaaatagatagaatctataaaacgattaaacaatatcacgaaagtagaaaacgaaaaattatcgtcactaacgtgattattattgtcataaacattatcgagcaggcattgctaaaactcggatttgaagaaatcaaaggactgagtaccgatatcacttcagaaattatcgatgtggagatcggagatgactgcgatgctgtagcatctaaactaggaatcggtaacagtccggttcttaatattgtattgtttatactcaagatattcgttaaacgaattaaaattatttaatttaatacattcccatatccagacaacaatcgtctggattaatctgttcctgtcgtctcataccggacgacatattaatctttttattagtgggcatctttttagatggtttctttttcccagcattaactgagtcgatacctagaagatcgtgattgatctctccgaccattccacgaacttctaattggccgtctctgacggtaccataaactattttaccagcattagtaacagcttggacaatctgaccatccatcgcattgtacgatgtagtagtaactgttgttctacgtctaggagcaccagaagtatttttggagcccttggatgttgatgtagaagaagacgaggattttgattttggtttacatgtaatacattttgaactctttgattttgtatcacatgcgccggcagtcacatctgtttgagaattaagattattgttgcctcctttgacggctgcatctccaccgatttgcgctagtagatttttaagctgtggtgtaatcttattaactgtttcgatataatcatcgtaactgcttctaacggctaaattttttttatccgccatttagaagctaaaaatatttttatttatgcagaagatttaactagattatacaatgaactaatatgatccttttccagattatttacaaacttggtattttttggttctggaggaggcgaatttaaattcggacttggattcggattttgtaagttcttgatcttattatacatcgagtataggatggcgacagtaactgctacacaaataccgatcaaaagaagaataccaatcatttattgacaataacttcactattgatcaagtatgcaatatatcatcttttcactaaataagtagtaataatgattcaacaatgtcgagatatatggacgataataatttagttcatggaaatatcgctatgattggtgtgaatgactccgctaactctgtggggtgcgcagtgctttccccacatagaataaattagcattccgactgtgataataataccaagtataaacgccataatactcaatactttccatgtacgagtgggactggtagacttactaaagtcaataaaggcgaagatacacgaaagaatcaaaagaatgattccagcgattagcacgccggaaaaataatttccaatcataagcatcatgtccatttaactaataaaaattttaaatcgccgaatgaacaaagtggaatataaaccatataaaaacaatagtttgtactgcaaaaataatatctatttttgttttcgaagatatggtaaaattaaatagtagtacacagcatgttataactaacagcagcaacggctcgtaattacttatcatttactagacgaaaaggtggtgggatattttcttgctcaaataatacgaatatatcacccatccattttatgcgatgtttatatactctaatctttaatagatctatagacgacgggtttaccaacaatatagattttatcgattcatctaatttaaacccttccttaaacgtgaatgatctattatctggcataacgatgaccctacctgatgaatcggacaatgtactgggccatgtagaataaattatcaacgaattatcgtctacgaacatttatatcatttgttttaattttaggacgcgaataaatggatataaaatagaaaataacagatattacaaccagtgttatggccgcgcccaaccaggtaggcagttttattttatcttttactacaggttctcctggatgtacgtcaccaacggcggacgtagttctagtacaattagacgtaagttccgcttgggaattttttaacgctaaagagttaacgttaatcgtgcacccaacgtatttacatctagttcgttgaacatcttgattataatataaccattttctatctctagattcgtcagtgcactcatgtaaccaacataccctaggtcctaaatatttatctccggaattagattttggataattcgcgcaccaacaatttctatttcctttatgatcgttacaaaagacgtataatgccgtatccccaaaagtaaaataatcaggacgaataattctaataaactcagaacaatatctcgcatccatatgtttggagcaaatatcggaataagtagacatagccggtttccgttttgcacgtaaccattctaaacaattggggtttccaggatcgtttctacaaaatccagtcatgaaatcgtcacaatgttctgtcttgtaattattattaaatatttttggacagtgtttggtatttgtcttagaacaacattttgccacgctatcactatcgcccaggagataatccttttttataaaatgacatcgttgcccggatgctatataatcagtagcgtgttttaaatccttaatatattcaggagttacctcgttctgataatagattaatgatccaggacgaaatttgaaagaactacatggttctccatgaattaatacatattgtttagcaaattcaggaactataaaactactacaatgatctatcgacataccatctatcaaacaaaacttgggtttaatttctcccggagatgtttcataatagtacgtataactttcttctgcaaacttaacagctctattatattcaggataattaaaacctaattccatatatttgtctcgtatatctgctattcctggtgctattttgattctattaagagtaacagctgcccccattcttaataatcgtcagtatttaaactgttaaatgttggtatatcaacatctaccttatttcccgcagtataaggtttgttgcaggtatactgttcaggaatggttacatttatacttcttctatagtcctgtctttcgatgttcatcacatatgcaaagaacagaataaacaaaataatgtaagaaataatattaaatatctgtgaattcgtaaatacattgattgccataataattacagcagctacaatacacacaatagacattcccacagtgttgccattacctccacgatacatttgagttactaagcaataggtaataactaagctagtaagaggcaatagaaaagatgagataaatatcatcaatatagagattagaggagggctatatagagccaagacgaacaaaatcaaaccgagtaacgttctaacatcattatttttgaagattcccaaataatcattcattcctccataatcgttttgcatcatacctccatctttaggcataaacgattgctgctgttcctctgtaaataaatctttatcaagcactccagcacccgcagagaagtcgtcaagcatattgtaatatcttaaataactcatttatatattaaaaaatgtcactattaaagatggagtataatctttatgccgaactaaaaaaaatgacttgtggtcaacccctaagtctttttaacgaagacggggatttcgtagaagttgaaccgggatcatcctttaagtttctgatacctaagggattttacgcctctccttccgtaaagacgagtctagtattcgagacattaacaacgaccgataataaaatcactagtatcaatccaacaaatgcgccaaagttatatcctcttcaacgcaaagtcgtatctgaagtagtttctaatatgaggaaaatgatcgaatcaaaacgtcctctatacatcactcttcacttggcgtgtggatttggtaagactattaccacgtgttatcttatggctacacacggtagaaaaaccgtcatttgcgtacccaataaaatgttaatacatcaatggaagacacaggtagaggcagtcggattggaacataagatatccatagatggagtaagtagtctattaaaggaactaaagactcaaagtccggatgtattaatagtagtcagtagacatctgacaaacgatgccttttgtaaatatatcaataagcattatgatttgttcatcttggatgaatcacatacgtataatctgatgaacaatacagcagttacaagatttttagcgtattatcctccgatgatgtgttattttttaactgctacacctagaccatctaaccgaatttattgtaacagtattattaatattgccaagttatccaatctaaaaaaaactatctatgcagtagatagtttttttgagccatattccacagataatattagacatatggtaaaacgactagatggaccatctaataaatatcatatatataccgagaagttattatctgtagacgagcctagaaatcaacttattcttgataccctggtagaagaattcaagtcaggaactattaatcgcattttagttattactaaactacgtgaacatatggtattattctacaaacgattattagattttttcggaccagaggttgtatttataggagacgcccaaaatagacgtactccagatatggtcaaatcaatcaaggaactaaatagatttatattcgtatccaccttattttattccggtactggtttagatattcctagtttggattcgttgttcatttgctcggcagtaatcaacaatatgcaaatagagcaattactagggagggtatgtcgagaaacagaactattagataggacggtatatgtatttcctaacacatccatcaaagaaataaagtacatgataggaaatttcatgcaacgaattattagtctgtctgtagataaactaggatttaaacaaaaaagttatcggaaacatcaagaatccgatcccacttctgcatgtacaacatcatccagagaagaacgtgtattaaatagaatatttaactcgcaaaatcgttaagaagtttaagcgacgatccgcatgctgcgcaggccagtgtattacccctcatagtattaatataatccaatgatacttttgtgatgtcggaaatcttaaccaatttagactgacaggcagaacacgtcatgcaatcatcatcgtcatcgataactgtagtcttgggcttctttttgcgactcttcattccggaacgcacattggtgctatccatttaggtagtaaaaaataagtcagaatatgccctataacacgatcgtgcaaaacctggtatatcgtctctatctttatcacaatatagtgtatcgacatttttattattattgacctcgtttatcttggaacatggaatgggaacatttttgttatcaacggccatctttgccttaattccagatgttgtaaaattataactaaacagtctatcatcgacacaaatgaaattcttgtttagacgtttgtagtttacgtatgcggctcgttcgcgtctcattttttcagatattgcaggtactataatattaaaaataagaatgaaataacataggattaaaaataaagttatcatgacttctagcgctgatttaactaacttaaaagaattacttagtctgtacaaaagtttgagattttcagattctgcggctatagaaaagtataattctttggtagaatggggaacatctacttactggaaaataggcgtgcaaaaggtagctaatgtcgagacgtcaatatctgattattatgatgaggtaaaaaataaaccgtttaatattgatccgggctattacattttcttaccggtatattttgggagcgtctttatttattcgaagggtaaaaatatggtagaacttggatctggaaactcttttcaaataccagatgatatgcgaagtgcgtgtaacaaagtattagacagcgataacggaatagactttctgagatttgttttgttaaacaatagatggataatggaagatgctatatcaaaatatcagtctccagttaatatatttaaactagctagtgagtacggattaaacatacccaaatatttagaaattgaaatagaggaagacacattatttgacgacgagttatactctattatagaacgctctttcgatgataaatttccaaaaatatccatatcgtatattaagttgggagaacttagacggcaagttgtagactttttcaaattctcattcatgtatattgagtccatcaaggtagatcgtataggagataatatttttattcctagcgttataacaaaatcaggaaaaaagatattagtaaaagatgtagaccatttaatacgatccaaggttagagaacatacatttgtaaaagtaaaaaagaaaaacacattttccattttatacgactatgatggaaacggaacagaaactagaggagaagtaataaaacgaattatagacactataggacgagactattatgttaacggaaagtatttctctaaggttggtagtgcaggcttaaagcaattgactaataaattagatattaatgagtgcgcaactgtcgatgagttagttgatgagattaataaatccggaactgtaaaacgaaaaataaaaaaccaatcagcatttgatttaagcagagaatgtttgggatatccagaagcggattttataacgttagttaataacatgcggttcaaaatagaaaattgtaaggttgtaaatttcaatattgaaaatactaattgtttaaataacccgagtattgaaactatatatggaaactttaaccagttcgtctcaatctttaatgtcgtcaccgatgtcaaaaaaagattattcgagtgaaataatatgcgcctttgatataggtgcaaaaaatcctgccagaactgttttagaagtcaaggataactccgttagggtattggatatatcaaaattagactggagttctgattgggaaaggcgcatagctaaagatttgtcacaatatgaatacactacagttcttctagaacgtcagcctagaaggtcgccgtatgttaaatttatctattttattaaaggctttttatatcatacatcggctgccaaagttatttgcgtctcgcctgtcatgtctggtaattcatatagagatcgaaaaaagagatcggtcgaagcatttcttgattggatggacacattcggattgcgagactccgttccggatagacgcaaattagacgatgtagcggatagtttcaatttggctatgagatacgtattagataaatggaatactaattatacaccttataataggtgtaaatctagaaattacataaaaaaaatgtaataacgttagtaacgccattatggataatctatttacctttctacatgaaatagaagatagatatgccagaactatttttaactttcatctaataagttgcgatgaaataggagatatatatggtcttatgaaagaacgcatttcctcagaggatatgtttgataatatagtgtataataaagatatacatcctgccattaagaaactagtgtattgcgacatccaacttactaaacacattattaatcagaatacgtatccggtatttaacgattcttcacaagtgaaatgttgtcattatttcgacataaactcagataatagcaatattagctctcgtacagtagagatatttgagagggaaaagtcatctcttgtatcatatattaaaactaccaataagaagagaaaggtcaattacggcgaaataaagaaaactgttcatggaggcactaatgcaaattacttttccggtaaaaagtctgacgagtatctgagtactacagttagatccaacattaatcaaccttggatcaaaaccatctctaagaggatgagagttgatatcattaatcactctatagtaacgcgtggaaaaagctctatattacaaactatagaaattatttttactaatagaacatgtgtgaaaatattcaaggattctactatgcacattattctatccaaggacaaggatgaaaaggggtgtatacacatgattgacaaattattctatgtctattataatttatttctgttgttcgaagatatcatccaaaacgagtactttaaagaagtagctaatgttgtaaaccacgtactcacggctacggcattagatgagaaattattcctaattaagaaaatggctgaacacgatgtttatggagttagcaatttcaaaatagggatgtttaacctgacatttattaagtcgttggatcataccgttttcccctctctgttagatgaggatagcaaaataaagttttttaaggggaaaaagctcaatattgtagcattacgatctctggaggattgtataaattacgtgactaaatccgagaatatgatagaaatgatgaaggaaagatcgactattttaaatagcatagatatagaaacggaatcggtagatcgtctaaaagaattgcttctaaaatgaaaaaaaacactaattcagaaatggatcaacgactagggtataagtttttggtgcctgatcctaaagccggagttttttatagaccgttacatttccaatatgtatcgtattctaattttatattgcatcgattgcatgaaatcttgaccgtcaagcggccactcttatcgtttaagaataatacagaacgaattatgatagaaattagcaatgttaaagtgactcctccagattactcacctataatcgcgagtattaaaggtaagagttatgacgcattagccacgttcactgtaaatatctttaaagaggtaatgaccaaagagggtatatccatcactaaaataagtagttatgagggaaaagattctcatttgataaaaattccgctactaataggatacgggaataaaaatccacttgatacagccaagtatcttgttcctaatgtcataggtggagtctttatcaataaacaatctgtcgaaaaagtaggaattaatctagtagaaaagattacaacatggccaaaatttagggttgttaagccaaactcattcactttctcgttttcctccgtatcccctcctaatgtattaccgacaagatatcgccattacaagatatctctggatatatcacaattggaagcgttgaatatatcatcgacaaagacatttataacggtcaatattgttttgctgtctcaatatttatctagagtgagtctagaattcattagacgtagtttatcatacgatatgcctccagaagttgtctatctagtaaacgcgataatagatagtgctaaacgaattactgaatctattactgactttaatattgatacatacattaatgacctggtggaagctgaacacattaaacaaaaatctcagttaacgatcaacgagttcaaatatgaaatgctgcataactttttacctcatatgaactatacacccgatcaactaaagggattttatatgatatctttactaagaaagtttctctactgtatcttccacacttctagatatccagatagagattcgatggtttgtcatcgcatcctaacgtacggcaaatattttgagacgttggcacatgatgaattagagaattacataggcaacatccgaaacgatatcatgaacaatcacaagaacagaggcacttacgcggtaaacattcatgtactaacaactcccggacttaatcacgcgttttctagcttattgagtggaaagttcaaaaagtcagacggtagttatcgaacacatcctcactattcatggatgcagaatatttctattcctaggagtgttggattttatccggatcaagtaaagatttcaaagatgttttctgtcagaaaataccatccaagtcaatatctttacttttgttcatcagacgttccggaaagaggtcctcaggtaggtttagtatctcaattgtctgtcttgagttccattacaaatatactaacgtctgagtatttggatttggaaaagaaaatttgtgagtatatcagatcatattataaagatgatataagttactttgaaacaggatttccaatcactatagaaaatgctctagtcgcatctcttaatccaaatatgatatgtgattttgtaactgactttagacgtagaaaacggatgggattcttcggtaacttggaggtaggtattactttagttagggatcacatgaatgaaattcgcattaatattggagcgggaagattagtcagaccattcttggttgtggataacggagagctcatgatggatgtgtgtccggagttagaaagcagattagacgacatgacattctctgacattcagaaagagtttccgcatgtcatcgaaatggtagatatagaacaatttacttttagtaacgtatgtgaatcggttcaaaaatttagaatgatgtcaaaggatgaaagaaagcaatacgatttatgtgactttcctgccgaatttagagatggatatgtagcatcttcattagtgggaatcaatcacaattctggacccagagctattcttggatgtgctcaagctaaacaagctatctcttgtctgagctcggatatacgaaataaaatagacaatggaattcatttgatgtatccagagaggccaatcgtgattagtaaggctttagaaacttcaaagattgcggctaattgcttcggccaacatgttactatagcattaatgtcgtacaaaggtatcaatcaagaggatggaattatcatcaaaaaacaatttattcagagaggcggtctcgatattgttacagccaagaaacatcaagtagaaattccattggaaaactttaataacaaagaaagagataggtctaacgcctattcaaaattagaaagtaatggattagttagactgaatgctttcttggaatccggagacgctatggcacgaaatatctcatcaagaactcttgaagatgattttgctagagataatcagattagcttcgatgtttccgagaaatataccgatatgtacaaatctcgcgttgaacgagtacaagtagaacttactgacaaagttaaggtacgagtattaaccatgaaagaaagaagacccattctaggagacaaatttaccactagaacgagtcaaaagggaacagtcgcgtatgtcgcggatgaaacggaacttccatacgacgaaaatggtatcacaccagatgtcattattaattctacatccatcttctctagaaaaactatatctatgttgatagaagttattttaacagccgcatattctgctaagccgtacaacaataagggagaaaaccgacctgtctgttttcctagtagtaacgaaacatccatcgatacatatatgcaattcgctaaacaatgttatgagcattcaaatccgaaattgtccgatgaagaattatcggataaaatcttttgtgaaaagattctctatgatcctgaaacggataagccttatgcatccaaagtattttttggaccaatttattacttgcgtctgaggcatttaactcaggacaaggcaaccgttagatgtagaggtaaaaagacgaagctcattagacaggcgaatgagggacgaaaacgtggaggaggtatcaagttcggagaaatggagagagactgtttaatagcgcatggtgcagccaatactattacagaagttttgaaagattcggaagaagattatcaagatgtgtatgtttgtgaaaattgtggagacatagcagcacaaatcaagggtattaatacatgtcttagatgttcaaaacttaatctctctcctctcttaacaaaaattgataccacgcacgtatctaaagtatttcttactcaaatgaacgccagaggcgtaaaagtcaaattagatttcgaacgaaggcctccttcgttttataaaccattagataaagttgatctcaagccgtcttttctggtgtaatattctagtttggtagtagatacatatcaatatcatcaaattcgagatccgaattataaaatgggcgtggattgttaactatagaatcggacgtctgatattcgaaaatctgtggagtttcaggttttggtggaggtgtaactgctacttgggatactgaagtctgatattcagaaagctgtggatgttctggttcggcatccaccgatggtgtcacatcactaatcggttcggtaacgtctgtggatggaggtgctacttctacagaacctgtagcctcagttgtcaacggagatacatttttaatgcgagaaaatgtataatttggtaatggtttcttatgtggatctgaagaagaggtaagatatctactagaaagataccgatcacgttctagttctcttttgtagaacttaactttttctttctccgcatctagttgatattccaacctcttcacgttactacgttcagattccaattcacgttcgcatgggttacctccgcagtttttacgagcgatttcacgttcagccttcatgcgtctctccctctctctatcgagtttatcagagcagtctttctgaaggcgatcgaactccataaatttctccaacgctttgattgtttccatagatttccgaagttcagcttttaggactgtgattctttttctttcgaattcacagctggatgtacaaccgtttccattaccgccatctctaagtttcttttctagatcggcaacatttcatccccatgccttttacattcctcgagtctactgtcgtcgaaatatcgttccagctccttttcgacatcaataactttagcacgttgtctctcaagctctcttttgtagttatctgattccctggcacgtttaagatcttcatgcaattgagtcagctcttaacttcctctcttgcttcttcgtcatagtacgcgcaatcactgtgagatccattgttaccacgtctacactcggcgagctcgcgtttaagagattcaatttcccgtttgtattggtccatgtttccattgctaccaccattagatttacaggctgctagttgtcgttcgagatcagaaatacgggttttcttggaattgatttcgtcgatgtacttggcatcgaaacacttattaagttctttttccaattctacgattttatttctttcgcgagtcaattccctcctgtagtaactatctgttttgtcagattcacgctctctacgtagactttcttgcaagttactaatttgttccctagcacgtccgagtttagttttatatgctgaatagagttctgattcatcctttgagcagatctctagcgatcgtttaagattcctaattctagtctttagcctatttacctcctcagaagatgttccgttaccgttgcgtttacactcgttaagctgtctatcaagatccatgattctatctctaagacgttgcatctctctttccatatcagcattgctttcattattacgtctgcagtcactcaactgtctttcaatatctgagattctatctctaagacgtcgcatctctctctgtttcggcattggtttcattattacgtttacagtcgttcaactgtctttcaagatctgatattctagattggagtctgctaatctctgtagcattttcacggcattcactcagttgtctttcaagatctgaaattttagattggagtctgctaatctctgtaagatttcctcctccgctctcgatgcagtcggtcaacttattctctagttctctaatacgcgaacgcagtgcatcaacttcttgcgtgtcttcctggttgcgtgtacattcatcgagatctctaacgcgtcgtcgttcttcctcaagttctctgcgtactacagaaagcgtgtccctatcttgttgatatttagcaatttctgattctagagtactgattttgcttacgtagttactaatagttgtcttggccttatcaagatcctccttgtatttgtcgcattccttgatatccctacgaagtctggacagttcccattcgacattacgacgtttatcgatttcagctcggagatcgtcatcgcgttgttttagccacatacgactgagttcaagttctcgttgacaagatccatctacttttccattcctaatagtatccagttccttttctagttctgaacgcatttctcgttccctatcaagcgattctctcaattctcggatagtcttcttatcaatttctaataaatctgaaccatcatctgtcccattttgaatatccctgtgttctttgatctcttttgtaagtcggtcgattctttcggttttataaacagaatccctttccaaagtcctaatcttactgagtttatcactaagttctgcattcaattcggtgagttttctcttggcttcttccaactctgttttaaactctccactatttccgcattcttcctcgcatttatctaaccattcaattagtttattaataactagttggtaatcagcgattcctatagccgttcttgtaattgtgggaacataattaggatcttctaatggattgtatggcttgatagcatcatctttatcattattagggggatggacaaccttaattggttggtcctcatctcctccagtagcgtgtggttcttcaataccagtgttagtaataggcttaggcaaatgcttgtcgtacgcgggcacttcctcatccatcaagtatttataatcgggttctacttcagaatattcttttctaagagacgcgacttcgggagttagtagaagaactctgtttctgtatctatcaacgctggaatcaatactcaagttaaggatagcgaatacctcatcgtcatcatccgtatcttctgaaacaccatcatatgacatttcatgaagtctaacgtattgataaatagaatcagatttagtattaaacagatccttaacctttttagtaaacgcatatgtatattttagatctccagatttcataatatgatcacatgccttaaatgtcagtgcttccatgatataatctggaacactaatgggtgacgaaaaagatacagcaccatatgctacgttgataaataaatctgaaccactaagtagataatgattaatgttaagaaagaggaaatattcagtgtataggtatgtcttggcgtcatatcttgtactaaacacgctaaacagtttgttaatgtgatcaatttccaatagattaattagagcagcgggaataccaacaaacatattaccacatccgtattttctatgaatatcacatatcatgttaaaaaatcttgatagaagagcgaatatctcgtctgacttaatgagtcgtagttcagcagcaacataagtcataactgtaaatagaacatactttcctgtagtgttgattctagactccacatcaacaccattattaaaaatagttttatatacatctttaatctgctctccgttaatcgtcgaacgttctagtatacggaaacactttgatttcttatctgtagttaatgacttagtgatatcacgaagaatattacgaattacatttcttgtttttcttgagagacctgattcagaactcaactcatcgttccatagtttttctacctcagtggcgaaatctttggagtgcttggtacatttttcaataaggttcgtgacctccatttattataaaaaatttattcaaaacttaactacaatcgggtaattataagatcgtagatctcccatgtggcggaatactaccatctatcgcatgtggatggacagtaggtaatggccatgggaacagtaatgtttgcatatttatctttcttgctagtattactgcatattgtcccaatgtttcgatgtgatgttctaacctatcaactgccgctgtatcacaacaatagtgtccgatgaaattaagattatgatccaatgtgtttaatatatgattatcaagtcttatacgatccgcgtcttttttgacaggatcaggttcttctacaggaagaagtttcggcctcttatgatattcatgtctgggaaacggtggtctagggtgaggctccggtatcggagtgggttttggattataatcatcatcgtctatgacatcatcttcgacttcgatatttattttgctatcttgatgatgtcctgtatcagttgcattttcagcactcgactgaatattagcgcattcattgtctattattaccatatttctaaacccaaaatgtatgtgttgaacatcagtactatcgttgatgagtcttatagcatgaattcgcttatcgttatcgggtttatcttctgtcaccttagcaattccttttttattaaactctacataatcatatccatttctattgtttgttctaatataaacgagtatagcatcattgctaaatttttcaatagtatcaaaaacagaatatcctaaaccatataatatatattcaggaacactcaaactaaatgtccaggattctcctaaatacgtaaactttaatagtgcgaaatcattcaaaaatctaccacttatagatagatagtacataaatgcgtatagtagtctacctatctctttattatgaaaaccggcattacgatcatatatgtcgtgatatacctgtgatccgtttacgttaaaccataaatacatgggtgatcctataaacatgaatttatttctaattctcagagctatagttaattgaccgtgtaatatttgcttacatgcatacttgatacgcttattaataagatttttatcattgctcgttatttcagaatcgtatatataaggagtaccatcgtgattcttaccagatattatacaaaatactatatataaaatatattgacccacgttagtaatcatataaatgtttaacgttttaaattttgtattcaatgatccattatcatacgctatcatggtcttgtaatattcattctttaaaatataatattgtgttagccattgcattggagctcctaatggagattttctattctcatccattttaggataggctttcataaagtccctaataacttcgtgaataatgtttctatgttttctactgatgcatgtatttgcttcgatttttttatcccatgtttcatctatcatagatttaaacgcagtaatgctcgcaacattaacatcttgaaccgttggtacaattccgttccataaatttataatgttcgccatttatataactcattttttgaatatacttttaattaacaaaagagttaagttactcatatggacgccgtccagtctgaacatcaatctttttagccagagatatcatagccgctcttagagtttcagcgtgattttccaacctaaatagaacttcatcgttgcgtttacaacacttttctatttgttcaaactttgttgttacattagtaatctttttttccaaattagttagccgttgtttgagagtttcctcattgtcgtcttcatcggctttaacaattgcttcgcgtttagcctctggctttttagcagcctttgtagaaaaaaattcagttgctggaattgcaagatcgtcatctccggggaaaagagttccgtccatttaaagtacagattttagaaactgacactctgcgttatttatatttggtacaacacatggattataaatattgatgttaataacatcagaaaatgtaaagtctatacattgttgcatcgtgttaaattttctaatggatctagtattattgggtccaacttctgcctgaaatccaaatatggaagcggatacaaaaccgtttcctggataaaccacacatctccacttttgctttacatcagaaattgtgtcgttgacatcttgaactctcctatctaatgccggtgttccacctatagattttgaatattcgaatgctgcatgagtagcattaaattccttaatattgccataattttcatatattgagtaaccctggataaaaagtaaacacaccgcagccgtcgctaccacaataaaaaaaattgatagagagttcatttataatctattagaagctgacaaaatttttttacacgcatcagacaatgctttaataaatagttcaacatctacttttgtcatatcgaaccgatggtatgattctaacctagaattacatccgaaaaagttgactatgttcatagtcattaagtcattaacaaacaacattccagactctggattataagacgatactgtttcgtcacaattacctaccttaatcatgtgattatgaatattggctattagagcaccttctaagaaatctataatatctttgaaacacgatttaaaatcaaaccacgaatatacttctacgaagaaagttagtttacccataggagaaataactataaatggagatctaaatacaaaatccggatctatgatagttttaacattattatattctctattaaatacctccacatctaaaaatgttaattttgaaactatgtcttcgtttattaccgtacctgaactaaacgctataagctctattgtttgagaactctttaaacgatattcttgaaatacatgtaacaaagtttcctttaactcggtcggtttatctaccatagttacagaatttgtatccttatctataatataataatcaaaatcgtataaagttatataattatcgcgttcagattgtgatcttttcaaatagactaaaaaccccatttctctagtaagtatcttatgtatatgtttgtaaaatatcttcatggtgggaatatgctctaccgcagttagccattcctcattgacagcggtagatgtattagacaaaactattccaatgtttaacaagggccattttacgagattattaaatccttgtttgataaatgtagccaatgagggttcgagttcaacgacgattgaattctcttcccgcggatgctgcatgatgaacgacgggatgttgttcgattgatttggaattctttttcgactttttgtttatattaaatattttaaaatttatagcggatagcaattcatgtaccacggataatgtagacgcgtattgcgcatcgatatctttattattagataaatttatcaataaatgtgagaagtttgcctcgttaaggtcttccatttaaatattatataaacatttgtgtttgtatcttattcgtcttttatggaatagttttttactagtaaagctgcaattacacactttgtccgtaaaacataaatataaacaccagcttttatcaatcgttccaaaaagtcgacggcggacatttttaacatggcatctattttaaatacacttaggtttttggaaaaaacatcattttataattgtaacgattcaataactaaagaaaagattaagattaaacataagggaatgtcatttgtattttataagccaaagcattctaccgttgttaaatacttgtctggaggaggtatatatcatgatgatttggttgtattggggaaggtaacaattaataatctaaagatgatgctattttacatggatttatcatatcatggagtgacaagtagtggagcaatttacaaattgggatcgtctatcgatagactttctctaaataggactattgttacaaaagttaataattatgatgatacattttttgacgacgatgattgatcgctattgcacaattttgtttttgtactttctaatatagtgtttaggttctttttcatatgagaatattgatttactaaaatatctatgtttaacttttgttctatgacgtccttatcggcggtatcggtacatatacgtaattcaccttcacaaaatacggagtcttcgataataatagccaatcgattattggatctagctgtctgtatcatattcaacatgtttaatatatcctttcgtttcccctttacaggcatcgatcgtagcatattttccgcgtctgatatggaaatgttaaaactacaaaaatgcgtaatgttagcccgtcctaatattggtacgtgtctataagtttggcatagtagaataatagacgtgtttaaatgccttccaaagtttaagaattctattagagtattgcattttgatagtttatcgcctacatcatcaaaaataagtaaaaagtgtgctgattttttatgattttgtgcgacagcaatacatttttctatgttacttttagttcgtatcagattatattctagagattcctgactactaacgaaattaatatgatttggccaaatgtatccatcataatctgggttataaacgggtgtaaacaagaatatatgtttatattttttaactagtgtagaaaacagagatagtaaatagatagtttttccagatccagatcctcctgttaaaaccattctaaacggcatttttaataaattttctcttgaaaattgtttttcttggaaacaattcataattatatttacagttactaaattaatttgataataaatcaaaatatggaaaactaaggttgttagtagggaggagaacaaagaaggcacatcgtgatataaataacatttattatcatgatgacaccagaaaacgacgaagagcagacatctgtgttctccgctactgtttacggagacaaaattcagggaaagaataaacgcaaacgcgtgattggtctatgtattagaatatctatggttatttcactactatctatgattaccatgtccgcgtttctcatagtgcgcctaaatcaatgcatgtctgctaacgaggctgctattactgacgccgctgttgccgttgctgctgcatcatctactcatagaaaggttgcgtctagcactacacaatatgatcacaaagaaagctgtaatggtttatattaccagggttcttgttatatattacattcagactaccagttattctcggatgctaaagcaaattgcactgcggaatcatcaacactacccaataaatccgatgtcttgactacctggctcattgattatgttgaggatacatggggatctgatggtaatccaattacaaaaactacatccgattatcaagattctgatgtatcacaagaagttagaaagtatttttgtgttaaaacaatgaactaatatttatttttgtacattaataaatgaaatcgcttaatagacaaactgtaagtaggtttaagaagttgtcggtgccggccgctataatgatgatactctcaaccattattagtggcataggaacatttctgcattacaaagaagaactgatgcctagtgcttgcgccaatggatggatacaatacgataaacattgttatttagatactaacattaaaatgtctacagataatgcggtttatcagtgtcgtaaattacgagctagattgcctagacctgatactagacatctgagagtattgtttagtattttttataaagattattgggtaagtttaaaaaagaccaatgataaatggttagatattaataatgataaagatatagatattagtaaattaacaaattttaaacaactaaacagtacgacggatgctgaagcgtgttatatatacaagtctggaaaactggttaaaacagtatgtaaaagtactcaatctgtactatgtgttaaaaaattctacaagtgacaacaaaaaatgaattaataataagtcgttaacgtacgccgccatggacgccgcgtttgttattactccaatgggtgtgttgactataacagatacattgtatgatgatctcgatatctcaatcatggactttataggaccatacattataggtaacataaaaactgtccaaatagatgtacgggatataaaatattccgacatgcaaaaatgctactttagctataagggtaaaatagttcctcaggattctaatgatttggctagattcaacatttatagcatttgtgccgcatacagatcaaaaaataccatcatcatagcatgcgactatgatatcatgttagatatagaagataaacatcagccattttatctattcccatctattgatgtttttaacgctacaatcatagaagcgtataacctgtatacagctggagattatcatctaatcatcaatccttcagataatctgaaaatgaaattgtcgtttaattcttcattctgcatatcagacggcaatggatggatcataattgatgggaaatgcaatagtaattttttatcataaaagttgtaaagtaaataataaaacaataaatattgaactagtagtacgtatattgagcaatcagaaatgatgctggtacctcttatcacggtgaccgtagttgcgggaacaatattagtatgttatatattatatatttgtaggaaaaagatacgtactgtctataatgacaataaaattatcatgacaaaattaaaaaagataaagagttctaattccagcaaatctagtaaatcaactgatagcgaatcagactgggaggatcactgtagtgctatggaacaaaacaatgacgtagataatatttctaggaatgagatattggacgatgatagcttcgctggtagtttaatatgggataacgaatccaatgttatggcgcctagcacagaacacatttacgatagtgttgctggaagcacgctgctaataaataatgatcgtaatgaacagactatttatcagaacactacagtagtaattaatgaaacggagactgttgaagtacttaatgaagataccaaacagaatcctaactattcatccaatcctttcgtaaattataataaaaccagtatttgtagcaagtcaaatccgtttattacagaacttaacaataaatttagtgagaataatccgtttagacgagcacatagcgatgattatcttaataagcaagaacaagatcatgaacacgatgatatagaatcatcggtcgtatcattggtgtgattagtttcctttttataaaattgaagtaatatttagtattattgctgccgtcacgttgtacaaatggagatattccctgtattcggcatttctaaaattagcaattttattgctaataatgactgtagatattatatagatacagaacatcaaaaaattatatctgatgagatcaatagacagatggatgaaacggtacttcttaccaacatcttaagcgtagaagttgtaaatgacaatgagatgtaccatcttattcctcatagattatcgacgattatactctgtattagttctgtcggaggatgtgttatctctatagataatgacatcaatggcaaaaatattctaacctttcccattgatcatgctgtaatcatatccccactgagtaaatgtgtcgtagttagcaagggtcctacaaccatattggttgttaaagcggatatacctagcaaacgattggtaacatcgtttacaaacgacatactatatgtaaacaatctgtcactgattaattatttgccgttgtctgtattcattattagacgagtcaccgactatttggatagacacatatgcgatcagatatttgctaataataagtggtattcccttataaccatcgacgataagcaatatcctattccatcaaactgtataggtatgtcctctgccaagtacataaattctagcatcgagcaagatactttaatccatgtttgtaacctcgagcatccgttcgactcagtatacaaaaaaatgcagtcgtacaattctctacctatcaaggaacaaatattgtacggtagaattgataatataaatatgagcattagtatttctgtggattaatagatttctagtatggggatcattaatcatctctaatctctaaatacctcataaaacgaaaaaaaagctattatcaaatactgtacggaatggattcattctcttctctttttatgaaactctgttgtatatctactgataaaactggaagcaaaaaatctgatagaaagaataagaataagatcaaggattatatggaacacgattattataaaataacaatagttcctggttcctcttccacgtctactagctcgtggtattatacacatgcctagtaatagtctctttgcgttgacggaaagcagactagaaataacaggctaaaatgttcagacaccataatagttcccaacccagataataacagagttccatcaacacattcctttaaactcaatcccaaacccaaaaccgttaaaatgtatccggccaattgatagtagataatgaggtgtacagcgcatgataatttacacagtaaccaaaatgaaaatactttagtaattataagaaatatagacggtaatgtcatcatcaacaatccgataatatgcctgagagtaaacattgacggataaaacaaaaatgctccgcataactctatcatggcaataacacaaccaaatacttgtaagattcctaaattagtagaaaatacaacgaatatcgatgtataagtgatctcgagaaataataagaataaagtaatgcccgtaaagataaacatcaacattgtttggtaatcattaaaccaattagtatgaagttgaactaatttcacagtagattttattccagtgttatcctcgcatgtataagtacctggtaagatatctttatattccataatcaatgagacatcactatctgataacgaatgaagtctagcactagtatgccatttacttaatattgtcgtcttggaagttttattataagttaaaatatcatggttatccaatttccatctaatatactttgtcggattatctatagtacacggaataatgatggtatcattacatgctgtatactctatggtctttgtagttgttataacaaccaacgtatagaggtatatcaacgatattctaactcttgacattttttatttatttaaaatgatacctttgttatttattttattctattttgctaacggtattgaatggcataagtttgaaacgagtgaagaaataatttctacttacttattagacgacgtattatacacgggtgttaatggggcggtatacacattttcaaataataaactaaacaaaactggtttaactaataataattatataacaacatctataaaagtagaggatgcggataaggatacattagtatgcggaaccaataacggaaatcccaaatgttggaaaatagacggttcagacgacccaaaacatagaggtagaggatacgctccttatcaaaatagcaaagtaacgataatcagtcacaacggatgtgtactatctgacataaacatatcaaaagaaggaattaaacgatggagaagatttgacggaccatgtggttatgatttattcacggcggataacgtaattccaaaagatggtttacgaggagcattcgtcgataaagacggtacttatgacaaagtttacattcttttcactgatactatcggctcaaagagaattgtcaaaattccgtatatagcacaaatgtgcctaaacgacgaaggtggtccatcatcattgtctagtcatagatggtcgacgtttctcaaagtcgaattagaatgtgatatcgacggaagaagttatagacaaattattcattctagaactataaaaacagataatgatacgatactatatgtattcttcgatagtccttattccaagtccgcattatgtacctattctatgaataccattaaacaatctttttctacgtcaaaattggaaggatatacaaagcaattgccgtctccagctcctggtatatgtttaccagctggaaaagttgttccacataccacgtttgaagtcatagaacaatataatgtactagatgatattataaagcctttatctaaccaacctatcttcgaaggaccgtctggtgttaaatggttcgatataaaggagaaggaaaatgaacatcgggaatatagaatatacttcataaaagaaaattctatatattcgttcgatacaaaatctaaacaaactcgtagctcgcaagtcgatgcgcgactattttcagtaatggtaactgcgaaaccgttatttatagcagatatagggataggagtaggaatgccacaaatgaaaaaaatacttaaaatgtaatcttaatcgagtacaccacacgacaatgaacaaacataagacagattatgctggttatgcttgctgcgtaatatgcggtctaattgtcggaattatttttacagcgacactattaaaagttgtagaacgtaaattagttcatacaccattaatagataaaacgataaaagatgcatatattagagaagattgtcctactgactggataagctataataataaatgtatccatttatctactgatcgaaaaacctgggaggaaggacgtaatgcatgcaaagctctaaattcaaattcggatctaattaagatagagactccaaacgagttaagttttttaagaagccttagacgaggctattgggtaggagaatccgaaatattaaaccagacaaccccatataattttatagctaagaatgccacgaagaatggaactaaaaaacggaaatatatttgtagcacaacgaatactcccaaactgcattcgtgttacactatataacaattacactacatttttatcataccactacttcggttagatgttttagaaaaaaataaatatcgccgtaccgttcttgtttttataaaaataacaattaacaattatcaaattttttctttaatattttacgtggttgaccattcttggtggtaaaataatctcttagtgttggaatggaatgctgtttaatgtttccacactcatcgtatattttgacgtatgtagtcacatcgtttacgcaatagtcagactgtagttctatcatgcttcctacatcagaaggaggaacagttttaaagtctcttggttttaatctattaccgttagttttcatgaaatcctttgttttatccacttcacattttaaataaatgtccactatacattcttttgttaattttactagatcgtcatgggtcatagaatttataggttccgtagtccatggatccaaactagcaaacttcgcgtatacggtatcgcgattagtgtatacaccaactgtatgaaaattaagaaaacagtttaataaatcaacagaaatatttaatcctccgtttgatacagatgcgccatatttatggatttcggattcacacgttgtttgtctgaggtgttcgtctagtgttgcttctacgtaaacttcgattcccatatattctttattgtcagaatcgcataccgatttatcatcatacactgtttgaaaactaaatggtatacacatcaaaataataaataataacgagtacattctgcaatattgttatcgtaattggaaaaatagtgttcgagtgagttggattatgtgagtattggattgtatattttattttatattttgtaataagaataaaatgctaatgtcaagtttattccaatagatgtcttattaaaaacatatataataaataacaatggctgaatggcataaaattatcgaggatatctcaaaaaataataagttcgaggatgccgccatcgttgattacaagactacaaagaatgttctagctgctattcctaacagaacatttgccaagattaatccgggtgaaattattcctctcatcactaatcgtaatattctaaaacctcttattggtcagaaatattgtattgtatatactaactctctaatggatgagaacacgtatgctatggagttgcttactgggtacgcccctgtatctccgatcgttatagcgagaactcataccgcacttatatttttgatgggtaagccaacaacatccagacgtgacgtgtatagaacgtgtagagatcacgctacccgtgtacgtgcaactggtaattaaaataaaaagtaatattcatatgtagtgtcaattttaaatgatgatgatgaaatggataatatccatattgacgatgtcaataatgccggtattggcatacagttcatcgatttttagatttcattcagaggatgtggaattatgttatgggcatttgtattttgataggatctataatgtagtaaatataaaatataatccgcatattccatatagatataattttattaatcgcacgttaaccgtagatgaactagacgataatgtcttttttacacatggttattttttaaaacacaaatatggttcacttaatcctagtttgattgtctcattatcaggaaacttaaaatataatgatatacaatgctcagtaaatgtatcgtgtctcattaaaaatttggcaacgagtacatctactatattaacatctaaacataagacttattctctacatcggtccacgtgtattactataataggatacgattctattatatggtataaagatataaatgacaagtataatgacatctatgattttactgcaatatgtatgctaatagcgtctacattgatagtgaccatatacgtgtttaaaaaaataaaaatgaactcttaattatgctatgctattagaaatggataaaatcaaaattacggttgattcaaaaattggtaatgttgttaccatatcgtataacttggaaaagataactattgatgtcacacctaaaaagaaaaaagaaaaggatgtattattagcgcaatcagttgctgtcgaagaggcaaaagatgtcaaggtagaagaaaaaaatattatcgatattgaagatgacgatgatatggatgtagaaagcgcgtaatacgatctataaaaataagtatataaatactttttatttactgtactcttactgtgtagtggtgataccctactcgattatttttttaaaaaaaaaatacttattctgattcttctagccatttccgtgttcgtttgaatgccacatcgacgtcaaagataggggagtagttgaaatctagttctgcattgttggtacgcacctcaaatgtagtgttggatatcttcaacgtatagttgttgagtagtgatggttttctaaatagaattctcttcatatcattcttgcacgcgtacatttttagcatccatcttggaatcctagatccttgttctattcccaatggtttcatcaatagaagattaaacatatcgtacgaacacgatggagagtaatcgtagcaaaagtaagcatttcctttaatcttagatcccggatactggatatattttgcagccaacacgtgcatccatgcagcatttcctacatatacccggctatgcaccgcgtcatcatcgactgtacgatacataatgttaccgtgttgcttacattgctcgtaaaagactttcatcaatttgtctccttctccgtaaattccagtgggtcttaggcaacaagtatacaattttgctccattcatgattacggaattattggctttcataaccagttgctcggccatacgtttactttttgcgtatacatgtcctggtgatatatcataaagggtatgctcatggccgatgaatggatcaccgtgtttattgggtcctattgcttccatgctactagtatagatcaaatacttgattcctaggtccacacaagctgccaaaatagtctgtgttccataatagtttactttcatgatttcattatcggtgtattttccaaatacatccactagagcagccgtatgaataatcagatttaccccatctagcgcttctctcaccttatcaaagtcgtttatatcacattgtatatagtttataaccttaactttcgaggttattggttgtggatcttctacaatatctatgactctgatttcttgaacatcatctgcactaattaacagttttactatatacctgcctagaaatccggcaccaccagtaaccgcgtacacggccattgctgccactcataatatcagactacttattctattttactaaataatggctgtttgtataatagaccacgataatatcagaggagttatttactttgaaccagtccatggaaaagataaagttttaggatcagttattggattaaaatccggaacgtatagtttgataattcatcgttacggagatattagtcaaggatgtgattccataggcagtccagaaatatttatcggtaacatctttgtaaacagatatggtgtagcatatgtttatttagatacagatgtaaatatatttacaattattggaaaggcgttatctatttcaaaaaatgatcagagattagcgtgtggagttattggtatttcttacataaatgaaaagataatacattttcttacaattaacgagaatggcgtttgatatatcagttaatgcgtctaaaacaataaatgcattagtttacttttctactcagcaaaataaattagtcatacgtaatgaagttaatgatacacactacactgtcgaatttgatagggacaaagtagttgacacgtttatttcatataatagacataatgacaccatagagataagaggggtgcttccagaggaaactaatattggttgcgcggttagtatgacttacttgtataataagtatagttttaaactgattttagcagaatatataagacacagaaatactatatccggcaatatttattcggcattgatgacactagatgatttggctattaaacagtatggagacattgatctattatttaatgagaaacttaaagtagactccgattcgggactatttgactttgtcaactttgtaaaggatatgatatgttgtgattctagaatagtagtagctctatctagtctagtatctaaacattgggaattgacaaataaaaaatataggtgtatggcattagccgaacatatatctgatagtattccaatatctgagctatctagactacgatacaatctatgtaagtatctacgcggacacactgagagcatagaggataaatttgattattttgaagacgatgattcgtctacatgttctgccgtaaccgacagggaaacggatgtataattttttttatagcgtgaaggatatgataaaaaatataattgttgtatttatcccattccaatcaccttatatgattctgtaacacaataaaggagtcttatagatgtatagaggtcagatactggtttgataaactgtttattccacataagtatgtttgactttatggttagacccgcatactttaacaaatcactgaaaattggagttaggtattgacctctcagaatcagttgccgttctggaacattaaatgtattttttatgatatactccaacgcatttatgtgggcatacaacaagtcattactaatggaatattccaagagttttagttgtctagtatttaacaagagaagagatttcaacagactgtttatgaactcgaatgccgcctcattgtcgcttatattgatgatgtcgaattctcccaatatcatcaccgatgagtagctcatcttgttatcgggatccaagttttctaaagatgtcattaaaccctcgatcatgaatggatttatcatcatcgtttttatgttggacatgagcttagtccgtttgtccacatctatagaagatgatttctgaattatttcatatatctctctctttaactccaggaacttgtcaggatggtctactttaatatgttctcgtctaagagatgaaaatctttggatggttgcacgcgacttttctctaaaggatgacgttgcccaagatcctctcttaaatgaatccatcttatccttggacaagatggacagtctattttccttagatggtttaatatttttgttacccatgatctataaaggtagacctaatcgtctcggatgaccatatatttattttcagttttattatacgcataaattgtaaaaaatatgttaggtttacgaaaatgtctcgtggggcattaatcgtttttgaaggattggacaaatctggaaaaacaacacaatgtatgaacatcatggaatcaataccttcaaacacaataaaataccttaactttcctcagagatccactgtcactggaaagatgatagatgactatctaactcgtaaaaaaacctataatgatcatatagttaatctattattttgtgcaaatagatgggagtttgcatcttttatacaagaacaactagaacagggaattactttaatagttgatagatacgcattttctggagtagcgtatgccgccgctaaaggcgcgtcaatgactctcagtaagagttatgaatctggattgcctaaacccgacttagttatattcttggaatctggtagcaaagaaattaatagaaacgtcggtgaggaaatttatgaagatgttacattccaacaaaaggtattacaagaatataaaaaaatgattgaagaaggagatattcattggcaaattatttcttctgaattcgaggaagatgtaaagaaggagttgattaagaatatagttatagaggctatacacacggttactggaccagtggggcaactgtggatgtaatagtgaaattacattttttataaatagatgttagtacagtgttataaatggatgaagcatattactctggcaacttggaatcagtactcggatacgtgtccgatatgcataccgaactcgcatcaatatctcaattagttattgccaagatagaaactatagataatgatatattaaacaaggacattgtaaattttatcatgtgtagatcaaacttggataatccatttatctctttcctagatactgtatatactattatagatcaagagaactatcagactgagttgattaattcattagacgacaatgaaattatcgattgtatagttaataagtttatgagcttttataaggataacctagaaaatatagtagatgctatcattactctaaaatatataatgaataatccagattttaaaactacgtatgccgaagtactcggttccagaatagccgatatagatattaaacaagtgatacgtaagaatatactacaattgtctaataatatccgcgaacgatatttgtgaaaatattaaaaaaaaatactttttttattaaatgacgtcttttcgtgaatttagaaaattatgctgtgctatatatcacgcatcaggatataaagaaaaatctaaattaattagagactttataacagatagggatgataaatatttgatcattaagctattgcttcccggattagacgatagaatttataacatgaacgataaacaaattataaaattatatagtataatatttaaacaatctcaggaagatatgctacaagatttaggatacggatatataggagacactattaggactttcttcaaagagaacacagaaatccgtccacgagataaaagcattttaactttagaagaagtggatagttttttaactacgttatcatccgtaactaaagaatcgcatcaaataaaattattgactgatgtagcatctgtttgtacatgtaatgatttaaaatgtgtagtcatgcttattgataaagatctaaaaattaaagcgggtcctcggtacgtacttaacgctattagtcctaatgcctatgatgtgtttagaaaatctaataacttgaaagagataatagaaaattcatctaaacaaaatctagactctatatctatttctgttatgactccaattaatcccatgttagcggaatcgtgtgattctgtcaataaggcgtttaaaaaatttccatcaggaatgtttgcggaagtcaaatacgatggtgaaagagtacaagttcataaaaataataacgagtttgccttctttagtagaaacatgaaaccagtactctctcataaagtggattatctcaaagaatacataccgaaagcatttaaaaaagctacgtctatcgtattggattctgaaattgttcttgtagacgaacataatgtaccgctcccgtttggaagtttaggtatacacaaaaagaaagaatataaaaactctaacatgtgtttgttcgtgtttgactgtttgtactttgatggattcgatatgacggacattccattgtacgaacgaagatcttttctcaaagatgttatggttgaaatacccaatagaatagtattctcagagttgacgaatattagtaacgagtctcagttaactgacgtattggatgatgcactaacgagaaaattagaaggattggtcttaaaagatattaatggagtatacgaaccgggaaagagaagatggttaaaaataaagcgagactatttgaacgagggttccatggcagattctgccgatttagtagtactaggtgcctactatggtaaaggagcaaagggtggtatcatggcagtctttctaatgggttgttacgacgatgaatccggtaaatggaagacggttaccaagtgttcaggacacgatgataatacgttaagggagttgcaagaccaattaaagatgattaaaattaacaaggatcccaaaaaaattccagagtggttagtagttaataaaatctatattcccgattttgtagtagaggatccgaaacaatctcagatatgggaaatttcaggagcagagtttacatcttccaagtcccataccgcaaatggaatatccattagatttcctagatttactaggataagagaggataaaacgtggaaagaatctactcatctaaacgatttagtaaacttgactaaatcttaatagttacatacaaactgaaaattaaaataacactatttagttggtggtcgccatggatggtgttattgtatactgtctaaacgcgctagtaaaacatggcgaggaaataaatcatataaaaaatgatttcatgattaaaccatgttgtgaaagagtttgtgaaaaagtcaagaacgttcacattggcggacaatctaaaaacaatacagtgattgcagatttgccatatatggataatgcggtatccgatgtatgcaattcactgtataaaaagaatgtatcaagaatatccagatttgctaatttgataaagatagatgacgatgacaagactcctactggtgtatataattattttaaacctaaagatgccattcctgttatcatatctataggaaaggataaagatgtctgtgaactattaatctcatcagacatatcgtgtgcatgcgtggagttaaattcatatcacgtagccattcttcccatggatgtttccttttttaccaaaggaaatgcatcattgattattctcctgtttgatttctctatcgatgcggcacctctcttaagaagtgtaaccgataataatgttattatatctagacaccagcgtctacatgacgagcttccgagttccaattggttcaagttttacataagtataaagtccgactattgttctatattatatatggttgttgatggatctgtgatgcatgcgatagctgataatagaactcacgcaattattagcaaaaatatattagacaatactacgattaacgatgagtgtagatgctgttattttgaaccacagattaggattcttgatagagatgagatgctcaatggatcatcgtgtgatatgaacagacattgtattatgatgaatttacctgatgtaggcgaatttggatctagtatgttggggaaatatgaacctgacatgattaagattgctctttcggtggctggtaatttaataagaaatcgagactacattcccgggagacgaggatatagctactacgtttacggtatagcctctagataatttttttaagcacgaaataaaaaacataattttaaaccaatctatttcatactattttgtgtgatcaccatggacataaagatagatattagtatttctggtgataaatttacggtgactactaggagggaaaatgaagaaagaaaaaaatatctacctctccaaaaagaaaaaactactgatgttatcaaacctgattatcttgagtacgatgacttgttagatagagatgagatgtttactattctagaggaatattttatgtacagaggtctattaggcctcagaataaaatatggacgactctttaacgaaattaaaaaattcgacaatgatgcggaagaacaattcggtactatagaagaactcaagcagaaacttagattaaattctgaagagggagcagataactttatagattatataaaggtacaaaaacaggatatcgtcaaacttactgtatacgattgcatatctatgataggattgtgtgcatgcgtggtagatgtttggagaaatgagaaactgttttctagatggaaatattgtttacgagcgattaaactgtttattgatgatcacatgcttgataagataaaatctatactgcagaatagactagtatatgtggaaatgtcatagaaagttaaaagttaatgagagcaaaaatatataaggttgtattccatatttgttatttttttctgtaatagttagaaaaatacattcgatggtctatctatcagattattatgtgttataaggtactttttctcataataaactagagtatgagtaagatagtgtttttcaaaacatataaatctaaaattgatggatgagatatacagctattaatttcgaaaatatattttaatctgataactttaaacatggatttttaatggtggtttaacgttttaaaaaaagattttgttattgtagtatatgataatattaaaagatggatataaagaatttgctgactgcatgtactattttttacattactacattggctacggcagatatacctacttcgtcactgccacacgctccggtaaacggggcatgtgacgagggagaatatcttgataagaggcataatcaatgttgtaatcagtgtccacctggagaatttgccaaggttagatgtaatggtaacgataacacaaaatgtgaacgctgcccacctcatacatataccgcaatccccaattactctaatggatgtcatcaatgtagaaaatgcccaacaggatcatttgataaggtaaagtgtaccggaacacagaacagtaaatgttcgtgtcttcctggttggtattgcgctactgattcttcacagactgaagattgtcgagattgtataccaaaaaggagatgtccatgcggatactttggtggaatagatgaacaaggaaatcctatttgtaaatcgtgttgtgttggtgaatattgcgactacctacgtaattatagacttgatccatttcctccatgcaaactatctaaatgtaattaattatgattttgatgataatgttaccatacattatatcgctacttggttagtgtattattcagtatgaagacctattaataattacttatcttttgacgatcttgttataattataatataaaaatacttatggcatagtaactcataattgctgacgcgataaattcgtaataatctgttttgttcaaatttttataaggaatctacaggcataaaaataaaaatataatttataatatactcttacagcgcgccatcatgaataacagcagtgaattgattgctgttattaatggatttagaaatagtggacgattttgtgatattaatatagttattaatgatgaaaggataaacgctcacagactcatcctatctggagcctccgaatatttttccattctgttttccaataattttatcgattctaatgaatacgaagttaatctaagtcatttagattatcaaagtgttaacgatttgatcgattacatttatgggatacctttgagcctaactaacgataacgtgaaatatattctttcaaccgctgattttttacaaattggatctgctattacggagtgtgaaaattacatacttaaaaatctttgttctagaaactgtatcgatttctacatatacgctgataaatataataacaagaaaatagaatcagcgtcgtttaacacaatattacaaaatattttgagactcatcaacgatgaaaactttaaatacttaacagaggaatcaatgataaaaattttaagcgatgatatgttaaatataaaaaatgaggatttcgccccactaattctcattaaatggttagagagtactcaacaaccatgcaccgtcgagttacttaaatgcctcagaatatcattgctttccccacaagttataaaatcactttatagtcatcgactggttagttcaatctacgaatgtataacattcttaaacaatatagcattcttggatgaatcatttcctagataccatagcatcgagttgatatctatcggtataagtaattcgcatgataagatttccataaactgctacaatcataaaaaaaatacatgggaaatgatatcttcacgtagatataggtgtagtttcgcagtggccgtcctggataatattatctatatgatgggtggatatgatcagtccccgtatagaagttcaaaggttatagcgtacaatacatgtacaaattcttggatatatgatataccagagctaaaatatcctcgttctaattgtgggggactggctgatgacgaatacatttattgtataggcggcatacgcgatcaggattcatcgttgacatctagtattgatagatggaagccatcaaaaccatattggcagaagtatgctaaaatgcgcgaaccaaaatgtgatatgggggttgcgatgttaaacggattaatatatgttataggtggaatcgttaaaggtgacacgtgtaccgacgcactagagagtttatcagaagatggatggatgaagcatcaacgtcttccaataaaaatgtccaatatgtcgacgattgttcatgatggcaagatttatatatctggaggttacaacaatagtagtgtagttaatgtaatatcgaatctagtccttagctataattcgatatatgatgaatggaccaaattatcatcattaaacattcctagaattaatcccgctctatggtcagcgcataataaattatatgtaggaggaggaatatctgatgatgttcgaactaatacatctgagacatacgacaaagaaaaagattgttggacattggataatggtcacgtgttaccacgcaattatataatgtataaatgcgaaccgattaaacataaatatccattggaaaaaacacagtacacgaatgattttctaaagtatttggaaagttttataggtagttgatagaacaaaatacataattttgtaaaaataaatcactttttatactaatatgacacgattaccaatacttttgttactaatatcattagtatacgctacaccttttcctcagacatctaaaaaaataggtgatgatgcaactctatcatgtaatcgaaataatacaaatgactacgttgttatgagtgcttggtataaggagcccaattccattattcttttagctgctaaaagcgacgtcttgtattttgataattataccaaggataaaatatcttacgactctccatacgatgatctagttacaactatcacaattaaatcattgactgctagagatgccggtacttatgtatgtgcattctttatgacatcaactacaaatgacactgataaagtagattatgaagaatactccacagagttgattgtaaatacagatagtgaatcgactatagacataatactatctggatctacacattcaccggaaactagttctaagaaacctgattatatagataattctaattgctcgtcggtattcgaaatcggtacccggggatcagcttgcatgcctgcagcaattcccgaggctgtagccgacgatggtgcgccaggagagttgttgattcattgtttgcctccctgctgcggtttttcaccgaagttcatgccagtccagcgtttttgcagcagaaaagccgccgacttcggtttgcggtcgcgagtgaagatccctttcttgttaccgccaacgcgcaatatgccttgcgaggtcgcaaaatcggcgaaattccatacctgttcaccgacgacggcgctgacgcgatcaaagacgcggtgatacatatccagccatgcacactgatactcttcactccacatgtcggtgtacattgagtgcagcccggctaacgtatccacgccgtattcggtgatgataatcggctgatgcagtttctcctgccaggccagaagttctttttccagtaccttctctgccgtttccaaatcgccgctttggacataccatccgtaataacggttcaggcacagcacatcaaagagatcgctgatggtatcggtgtgagcgtcgcagaacattacattgacgcaggtgatcggacgcgtcgggtcgagtttacgcgttgcttccgccagtggcgcgaaatattcccgtgcaccttgcggacgggtatccggttcgttggcaatactccacatcaccacgcttgggtggtttttgtcacgcgctatcagctctttaatcgcctgtaagtgcgcttgctgagtttccccgttgactgcctcttcgctgtacagttctttcggcttgttgcccgcttcgaaaccaatgcctaaagagaggttaaagccgacagcagcagtttcatcaatcaccacgatgccatgttcatctgcccagtcgagcatctcttcagcgtaagggtaatgcgaggtacggtaggagttggccccaatccagtccattaatgcgtggtcgtgcaccatcagcacgttatcgaatcctttgccacgcaagtccgcatcttcatgacgaccaaagccagtaaagtagaacggtttgtggttaatcaggaactgttcgcccttcactgccactgaccggatgccgacgcgaagcgggtagatatcacactctgtctggcttttggctgtgacgcacagttcatagagataaccttcacccggttgccagaggtgcggattcaccacttgcaaagtcccgctagtgccttgtccagttgcaaccacctgttgatccgcatcacgcagttcaacgctgacatcaccattggccaccacctgccagtcaacagacgcgtggttacagtcttgcgcgacatgcgtcaccacggtgatatcgtccacccaggtgttcggcgtggtgtagagcattacgctgcgatggattccggcatagttaaagaaatcatggaagtaagactgctttttcttgccgttttcgtcggtaatcaccattcccggcgggatagtctgccagttcagttcgttgttcacacaaacggtgatacgtacacttttcccggcaataacatacggcgtgacatcggcttcaaatggcgtatagccgccctgatgctccatcacttcctgattattgacccacactttgccgtaatgagtgaccgcatcgaaacgcagcacgatacgctggcctgcccaacctttcggtataaagacttcgcgctgataccagacgttgcccgcataattacgaatatctgcatcggcgaactgatcgttaaaactgcctggcacagcaattgcccggctttcttgtaacgcgctttcccaccaacgctgatcaattccacagttttcgcgatccagactgaatgcccacaggccgtcgagttttttgatttcacgggttggggtttctacaggacgtaacattctagtcgaggaattcatttatagcatagaaaaaaacaaaatgaaattctactatatttttacatacatatattctaaatatgaaagtggtgattgtgactagcgtagcatcgcttctagacatctatatactatatagtaataccaatactcaagactacgaaactgatacaatctcttatcatgtgggtaatgttctcgatgtcgatagccatatgcccggtagttgcgatatacataaactgatcactaattccaaacccacccgctttttatagtaagtttttcacccataaataataaatacaataattaatttctcgtaaaagtagaaaatatattctaatttattgcacggtaaggaagtagaatcataaagaacagtgacggatccccgatccccgacctgcaggcatgcaagctcgactccggaaccaattactgataatgtagaagatcatacagacaccgtcacatacactagtgatagcattaatacagtaagtgcatcatctggagaatccacaacagacgagactccggaaccaattactgataaagaagatcatacagttacagacactgtctcatacactacagtaagtacatcatctggaattgtcactactaaatcaaccaccgatgatgcggatctttatgatacgtacaatgataatgatacagtaccaccaactactgtaggcggtagtacaacctctattagcaattataaaaccaaggactttgtagaaatatttggtattaccgcattaattatattgtcggccgtggcaattttctgtattacatattatatatataataaacgttcacgtaaatacaaaacagagaacaaagtctagatttttgacttacataaatgtctgggatagtaaaatctatcatattgagcggaccatctggtttaggaaagacagccatagccaaaagactatgggaatatatttggatttgtggtgtcccataccactagatttcctcgtcctatggaacgagaaggtgttgattaccattacgttaacagagaggccatctggaagggaatagccgccggaaactttctagaacatactgagtttttaggaaatatttacggaacttctaaaacagctgtgaatacagcggctattaataatcgtatttgtgtgatggatctaaacatcgacggtgttagaagtcttaaaaatacgtacctaatgccttactcggtgtatataagacctacctctcttaaaatggttgagaccaagcttcgtcgtagaaacactgaagctaacgatgagattcatcgtcgtgtgatgttggcaaaaactgacatggatgaggcaggtgaagccggtctattcgacactattatcattgaagatgatgtgaatttagcatatagtaagttaattcagatactacaggaccgtattagaatgtattttaacactaattagagacttaagacttaaaacttgataattaataatataactcgtttttatatgtgtctatttcaacgtctaatgtattagttaaatattaaaacttaccacgtaaaacttaaaatttaaaatgatatttcattgacagatagatcacacattatgaactttcaaggacttgtgttaactgacaattgcaaaaatcaatgggtcgttggaccattaataggaaaaggtggattcggtagtatttatactactaatgacaataattatgtagtaaaaatagagcccaaagctaacggatcattatttaccgaacaggcattttatactagagtacttaaaccatccgttatcgaagaatggaaaaaatctcacaatataaagcacgtaggtcttatcacgtgcaaggcatttggtctatacaaatccattaatgtggaatatcgattcttggtaattaatagattaggtgcagatctagatgcggtgatcagagccaataataatagactaccaaaaaggtcggtgatgttgatcggaatcgaaatcttaaataccatacaatttatgcacgagcaaggatattctcacggagatattaaagcgagtaatatagtcttagatcaaatagataagaataaattatatctagtggattacggattggtttctaaattcatgtctaatggcgaacatgttccatttataagaaatccaaataaaatggataacggtactctagaatttacacctatagattcgcataaaggatacgttgtatctagacgtggagatctagaaacacttggatattgtatgattagatggttgggaggtatcttaccatggactaagatatctgaaacaaagaattgtgcattagtaagtgccacaaaacagaaatatgttaacaatactgcgactttgttaatgaccagtttgcaatatgcacctagagaattgctgcaatatattaccatggtaaactctttgacatattttgaggaacccaattacgacaagtttcggcacatattaatgcagggtgtatattattaagtgtggtgtttggtcgataaaaattaaaaaataacttaatttattattgatctcgtgtgtacaaccgaaatcatggcgatgttttacgcacacgctctcggtgggtacgacgagaatcttcatgcctttcctggaatatcatcgactgttgccaatgatgtcaggaaatattctgttgtgtcagtttataataacaagtatgacattgtaaaagacaaatatatgtggtgttacagtcaggtgaacaagagatatattggagcactgctgcctatgtttgagtgcaatgaatatctacaaattggaaatccgatccatgatcaagaaggaaatcaaatctctatcatcacatatcgccacaaaaactactatgctctaagcggaatcgggtacgagagtctagacttgtgtttggaaggagtagggattcatcatcacgtacttgaaacaggaaacgctgtatatggaaaagttcaacatgattattctactatcaaagagaaggccaaagaaatgagtgcacttagtccaggacctatcatcgattaccacgtctggataggagattgtatctgtcaagttactgctgtggacgtacatggaaaggaaattatgaaaatgagattcaaaaagggtgcggtgcttccgatcccaaatctggtaaaagttaaacttggggagaatgatacagaaaatctttcttctactatatcggcggcaccatcgaggtaaccacctctctggaagacagcgtgaatcatgtactcatgaaacgtttggaaactatacgccatatgtggtctgttgtatatgatcattttgatattgtgaatggtaaagaatgctgttatgtgcatacgcattcatctaatcaaaatcctataccgagtactgtaaaaacaaatttgtacatgaagactatgggatcatgcattcaaatggattccatggaagctctagagtatcttagcgaactgaaggaatcaggtggatggagtcccagaccagaaatgcaggaatttgaatatccagatggagtggaagacactgaatcaattgagagattggcagaggagttcttcaatagatcagaacttcaggctggtgaatcagtcaaatttggtaattctattaattgttaaacatacatctgtttcagctaagcaactaagaacacgtatacggcagcagcttccttctatactctcatcttttaccaacacaaagggtggatatttgttcattggagttgataataatacacacaaagtatttggattcacggtgggttacgactacctcagactgatagagaatgatatagaaaagcatatcaaaagacttcgtgttgtgcatttctgtgagaagaaagaggacatcaagtacgcgtgtcgattcatcaaggtatataaacctggggatgagactacctcgacatacgtgtgcgctatcaaagtggaaagatgctgttgtgctgtgtttgcagattggccagaatcatggtatatggatactaatggtatcaagaagtattctccagatgaatgggtgtcacatataaaattttaattaatgtaactatagagaacaaataataaggttgtaatatcatatagacaataactaacaattaattagtaactgttatctcttttttaactaaccaactaactatatacctattaatacatcgtaattatagttcttaacatctattaatcattaattcgcttctttaattttttataaactaacattgttaattgaaaagggataacatgttacagaatataaattatatatggatttttttaaaaaggaaatacttgactggagtatatatttatctcttcattatatagcacgcgtgttttccaatttttccacatcccatataatacaggattataatctcgttcgaacatacgagaaagtggataaaacaatagttgattttttatctaggttgccaaatttattccatattttagaatatggggaaaatattctacatatttattctatggatgatgctaatacgaatattataattttttttctagatagagtattaaatattaataagaacgggtcatttatacacaatctcgggttatcatcatccattaatataaaagaatatgtatatcaattagttaataatgatcatccagataataggataagactaatgcttgaaaatggacgtagaacaagacattttttgtcctatatatcagatacagttaatatctatatatgtattttaataaatcatggattttatatagatgccgaagacagttacggttgtacattattacatagatgtatatatcactataagaaatcagaatcagaatcatacaatgaattaattaagatattgttaaataatggatcagatgtagataaaaaagatacgtacggaaacacaccttttatcctattatgtaaacacgatatcaacaacgtggaattgtttgagatatgtttagagaatgctaatatagactctgtagactttaatagatatacacctcttcattatgtctcatgtcgtaataaatatgattttgtaaagttattaatttctaaaggagcaaatgttaatgcgcgtaataaattcggaactactccattttattgtggaattatacacggtatctcgcttataaaactatatttggaatcagacacagagttagaaatagataatgaacatatagttcgtcatttaataatttttgatgctgttgaatctttagattatctattatccagaggagttattgatattaactatcgtactatatacaacgaaacatctatttacgacgctgtcagttataatgcgtataatacgttggtctatctattaaacaaaaatggtgattttgagacgattactactagtggatgtacatgtatttcggaagcagtcgcaaacaacaacaaaataataatggaagtactattgtctaaacgaccatctttgaaaattatgatacagtctatgatagcaattactaaacataaacagcataatgcagatttattgaaaatgtgtataaaatatactgcgtgtatgaccgattatgatactcttatagatgtacagtcgctacagcaatataaatggtatattttaagatgtttcgatgaaatagatatcatgaagagatgttatataaaaaataaaactgtattccaattagttttttgtatcaaagacattaatactttaatgagatacggtaaacatccttctttcgtgaaatgcactagtctcgacgtatacggaagtcgtgtacgtaatatcatagcatctattagatatcgtcagagattaattagtctattatccaagaagctggatcctggagataaatggtcgtgttttcctaacgaaataaaatataaaatattggaaaactttaacgataacgaactatccacatatctaaaaatcttataaacattattaaaatataaaatctaagtaggataaaatcacactacatcattgtttccttttagtgctcgacagtgtatactatttttaacgctcataaataaaaatgaaaacgatttccgttgttacgttgttatgcgtactacctgctgttgtttattcaacatgtactgtacccactatgaataacgctaaattaacgtctaccgaaacatcgtttaatgataaccagaaagttacgtttacatgtgatcagggatatcattctttggatccaaatgctgtctgtgaaacagataaatggaaatacgaaaatccatgcaaaaaaatgtgcacagtttctgattatgtctctgaactatataataaaccgctatacgaagtgaattccaccatgacactaagttgcaacggcgaaacaaaatattttcgttgcgaagaaaaaaatggaaatacttcttggaatgatactgttacgtgtcctaatgcggaatgtcaacctcttcaattagaacacggatcgtgtcaaccagttaaagaaaaatactcatttggggaatatatgactatcaactgtgatgttggatatgaggttattggtgcttcgtacataagttgtacagctaattcttggaatgttattccatcatgtcaacaaaaatgtgatatgccgtctctatctaacggattaatttccggatctacattttctatcggtggcgttatacatcttagttgtaaaagtggttttacactaacggggtctccatcatccacatgtatcgacggtaaatggaatcccatactcccaatatgtgtacgaactaacgaaaaatttgatccagtggatgatggtcccgacgatgagacagatttgagcaaactctcgaaagacgttgtacaatatgaacaagaaatagaatcgttagaagcaacttatcatataatcatagtggcgttgacaattatgggcgtcatatttttaatctccgttatagtattagtttgttcctgtgacaaaaataatgaccaatataagttccataaattgctaccgtaaatataaatccgttaaaataattaataatttaataacaaacaagtatcaaaagattaaagacttatagctagaatcaattgagatgtcttcttcagtggatgttgatatctacgatgccgttagagcatttttactcaggcactattataacaagagatttattgtgtatggaagaagtaacgccatattacataatatatacaggctatttacaagatgcgccgttataccgttcgatgatatagtacgtactatgccaaatgaatcacgtgttaaacaatgggtgatggatacacttaatggtataatgatgaatgaacgcgatgtttctgtaagcgttggcaccggaatactattcatggaaatgtttttcgattacaataaaaatagtatcaacaatcaactaatgtatgatataattaatagcgtatctataattctagctaatgagagatatagaagcgcttttaacgacgatggtatatacatccgtagaaatatgattaacaagttgtacggatacgcatctctaactactattggcacgatcgctggaggtgtttgttattatctgttgatgcatctagttagtttgtataaataattatttcaatatactagttaaaattttaagattttaaatgtataaaaaactaataacgtttttatttgtaataggtgcattagcatcctattcgaataatgagtacactccgtttaataaactgagtgtaaaactctatatagatggagtagataatatagaaaattcatatactgatgataataatgaattggtgttaaattttaaagagtacacaatttctattattacagagtcatgcgacgtcggatttgattccatagatatagatgttataaacgactataaaattattgatatgtataccattgactcgtctactattcaacgcagaggtcacacgtgtagaatatctaccaaattatcatgccattatgataagtacccttatattcacaaatatgatggtgatgagcgacaatattctattactgcagagggaaaatgctataaaggaataaaatatgaaataagtatgatcaacgatgatactctattgagaaaacatactcttaaaattggatctacttatatatttgatcgtcatggacatagtaatacatattattcaaaatatgatttttaaaaatttaaaatatattatcacttcagtgacagtagtcaaataacaaacaacaccatgagatatattataattctcgcagttttgttcattaatagtatacatgctaaaataactagttataagtttgaatccgtcaattttgattccaaaattgaatggactggggatggtctatacaatatatcccttaaaaattatggcatcaagacgtggcaaacaatgtatacaaatgtaccagaaggaacatacgacatatccgcatttccaaagaatgatttcgtatctttctgggttaaatttgaacaaggcgattataaagtggaagagtattgtacgggactatgcgtcgaagtaaaaattggaccaccgactgtaacattgactgaatacgacgaccatatcaatttgtacatcgagcatccgtatgctactagaggtagcaaaaagattcctatttacaaacgcggtgacatgtgtgatatctacttgttgtatacggctaacttcacattcggagattctaaagaaccagtaccatatgatatcgatgactacgattgcacgtctacaggttgcagcatagactttgtcacaacagaaaaagtgtgcgtgacagcacagggagccacagaagggtttctcgaaaaaattactccatggagttcgaaagtatgtctgacacctaaaaagagtgtatatacatgcgcaattagatccaaagaagatgttcccaatttcaaggacaaaatggccagagttatcaagagaaaatttaatacacagtctcaatcttatttaactaaatttctcggtagcacatcaaatgatgttaccacttttcttagcatgcttaacttgactaaatattcataactaatttttattaatgatacaaaaacgaaataaaactgcatattatacactggttaacgcccttataggctctaaccattttcaagatgaggtccctgattatagtccttctgttcccctctatcatctactccatgtctattagacgatgtgagaagactgaagaggaaacatggggattgaaaatagggttgtgtataattgccaaagatttctatcccgaaagaactgattgcagtgttcatctcccaactgcaagtgaaggattgataactgaaggcaatggattcagggatatacgaaacaccgataaattataaaaaaagcaatgtgtccgctgtttccgttaataatactattttcgtaactggcggattattcataaataactctaatagcacgatcgtggttaacaatatggaaaaacttgacatttataaagacaaacaatggtcgattatagaaatgcctatggctagggtatatcacggcattgactcgacatttggaatgttatattttgccggaggtctatccgttaccgaacaatatggtaatttagagaaaaacaacgagatatcttgttacaatcctagaacgaataagtggtttgatatttcatatactatttataagatatccatatcatcattgtgtaaactaaataacgtcttctatgtatttagtaaggacattggatatgtggaaaagtatgatggtgcatggaagttagtacatgatcgtctccccgctataaaggcattatcaacttctccttattgattgaaaatgaaaatataaatagtttttatgtatagcagtattaccctatagttttattgcttactactaacatggatacagatgttacaaatgtagaagatatcataaatgaaatagatagagagaaagaagaaatactaaaaaatgtagaaattgaaaataataaaaacattaacaagaatcatcccaatgaatatattagagaagcactcgttattaataccagtagtaatagtgattccattgataaagaagttatagaatgtatcagtcacgatgtaggaatatagatcatatctactaatttttataatcgatacaaaacataaaaaacaactcgttattacatagcaggcatggaatccttcaagtattgttttgataacgatggcaagaaatggattatcggaaatactttatattctggtaattcaatactctataaggtcagaaaaaatttcactagttcgttctacaattacgtaatgaagatagatcacaaatcacacaagccattgttgtctgaaatacgattctatatatctgtattggatcctttgactatcgacaactggacacgggaacgtggtataaagtatttggctattccagatctgtatggaattggagaaaccgatgattatatgttcttcgttataaagaattcgggaagagtattcgccccaaaggatactgaatcagtcttcgaagcatgcgtcactatgataaacacgttagagtttatacactctcgaggatttacccatggaaaaatagaaccgaggaatatactgattagaaataaacgtctttcactaattgactattctagaactaacaaactatacaagagtggaaactcacatatagattacaacgaggacatgataacttcaggaaatatcaattatatgtgtgtagacaatcatcttggagcaacagtttcaagacgaggagatttagaaatgttgggatattgcatgatagaatggttcggtggcaaacttccatggaaaaacgaaagtagtataaaagtaataaaacaaaaaaaagaatataaaaaatttatagctactttctttgaggactgttttcctgaaggaaatgaacctctggaattagttagatatatagaattagtatacacgttagattattctcaaactcctaattatgacagactacgtaaactgtttatacaagattgaaattatattcttttttttatagagtgtggtagtgttacggatatctaatattaatattagactatctctatcgcgctacacgaccaatatcgattactatggatatcttctatgaaaggagagaatgtatttatttctccagcgtcaatctcgtcagtattgacaatactgtattatggagctaatggatccactgctgaacagctatcaaaatatgtagaaacggaggagaacacggataaggttagcgctcagaatatctcattcaaatccatgaataaagtatatgggcgatattctgccgtgtttaaagattcctttttgagaaaaattggcgataagtttcaaactgttgacttcactgattgtcgcactatagatgcaatcaacaagtgtgtagatatctttactgaggggaaaatcaatccactattggatgaaccattgtctcctagcaattagtgccgtatactttaaagcaaaatggttgacgccattcgaaaaggaatttaccagtgattatcccttttacgtatctccgacggaaatggtagacgtaagtatgatgtctatgtacggcaaggcatttaatcacgcatctgtaaaagaatcattcggcaacttttcaatcatagaactgccatatgttggagatactagtatgatggtcattcttccagacaagattgatggattagaatccatagaacaaaatctaacagatacaaattttaagaaatggtgtgactttatggatgctatgtttatagatgttcacattcccaagtttaaggtaacaggctcgtataatctggtggatactctagtaaagtcaggactgacagaggtgttcggttcaactggagattatagcaatatgtgtaatttagatgtgagtgtcgacgctatgatccacaaaacgtatatagatgtcaatgaagagtatacagaagcagctgcagcaacttctgtactagtggcagactgtgcatcaacaattacaaatgagttctgtgcagatcatccgttcatctatgtgattaggcatgttgatggaaaaattcttttcgttggtagatattgctctccgacaactaattgttaaccattttttttaaaaaaaatagaaaaaacatgtggtattagtgcaggtcgttgttcttccaattgcaattggtaagatgacggccaactttagtacccacgtcttttcaccacagcactgtggatgtgacagactgaccagtattgatgacgtcaaacaatgtttgactgaatatatttattggtcgtcctatgcataccgcaacaggcaatgcgctggacaattgtattccacactcctctcttttagagatgatgcggaattagtgttcatcgacattcgcgagctggtaaaaaatatgccgtgggatgatgtcaaagattgtacagaaatcatccgttgttatataccggatgagcaaaaaaccatcagagagatttcggccatcatcggactttgtgcatatgctgctacttactggggaggtgaagaccatcccactagtaacagtctgaacgcattgtttgtgatgcttgagatgctaaattacgtggattataacatcatattccggcgtatgaattgatgagttgtacatcttgacattttctttcttctcttctccctttcttctcttctcccttcctccctcttctccctttcccagaaacaaacttttttacccactataaaataaaatgagtatactacctattatatttcttcctatatttttttattcttcattcgttcagacttttaacgcgtctgaatgtatcgacaaagggcaatattttgcatcattcatggagttagaaaacgagccagtaatcttaccatgtcctcaaataaatacgctatcatccggatataatatattagatattttatgggaaaaacgaggagcggataatgatagaattataccgatagataatggtagcaatatgctaattctgaacccgacacaatcagactctggtatttatatatgcattaccacgaacgaaacctactgtgacatgatgtcgttaaatttgacaatcgtgtctgtctcagaatcaaatatagatcttatctcgtatccacaaatagtaaatgagagatctactggcgaaatggtatgtcccaatattaatgcatttattgctagtaacgtaaacgcagatattatatggagcggacatcgacgccttagaaataagagacttaaacaacggacacctggaattattaccatagaagatgttagaaaaaatgatgctggttattatacatgtgttttagaatatatatacggtggcaaaacatataacgtaaccagaattgtaaaattagaggtacgggatagaataataccttctactatgcaattaccagatggcattgtaacttcaataggtagtaatttgactattgcatgcagagtatcgttgagacctcccacaacggacaccgacgtcttttggataagtaatggtatgtattacgaagaagatgatggggacggaaacggtagaataagtgtagcaaataaaatctatatgaccgataagagacgtgttattacatcccggttaaacattaatcctgtcaaggaagaagatgctacaacgtttacgtgtatggcgtttactattcctagcatcagcaaaacagttactgttagtataacgtgaatgtatgttgttacatttccatgtcaattgagtttataagaatttttatacattatcttccaacaaacaattgacgaacgtattgctatgattaactcccacgatactatgcatattattaatcattaacttgcagactatacctagtgctattttgacatactcgtgttcttgtgtaattgcggtatctatattattaaagtacgtaaatctagctatagttttattatttaattttagataatataccgtctccttatttttaaaaattgccacatcctttattaaatcatgaatgggaatttctatgtcatcgttagtatattgtgaacaacaagagcagatatctataggaaagggtggaatgcgatacattgatctatgtagttttaaaacacacgcgaactttgaagaatttatataaatcattccatcgatacatccttctatgttgacatgtatatatccaggaattcttttattaatgtcaggaaatgtataaactaaaacattgcccgaaagcggtgcctctatctgcgttatatccgttcttaacttacaaaatgtaaccaatacctttgcatgacttgttttgttcggcaacgttagtttaaacttgacgaatggattaattacaatagcatgatccgcgcatctattaagtttttttactttaacgcccttgtatgtttttacagagactttatctaaatttctagtgcttgtatgtgttataaatataacgggatatagaaccgaatcacctaccttagatacccaattacattttatcagatccagataataaacaaattttgtcgccctaactaattctatattgttatatattttacaattggttatgatatcatgtaataacttggagtctaacgcgcatcgtcgtacgtttatacaattgtgatttagtgtagtatatctacacatgtatttttccgcactatagtattctggactagtgataaaactatcgttatatctgtcttcaatgaactcatcgagatattgctctctgtcatattcatacacctgcataaactttctagacatcttacaatccgtgttattttaggatcatatttacatatttacgggtatatcaaagatgttagattagttaatgggaatcgtctataataatgaatattaaacaattatatgaggacttttaccacaaagcatcataaaaatgagtcgtcgtctgatttatgttttaaatatcaaccgcaaatcaactcataaaatacaagagaatgaaatatatacatattttagtcattgcaatatagaccatacttctacagaacttgattttgtagttaaaaactatgatctaaacagacgacaacctgtaactgggtatactgcactacactgctatttgtataataattactttacaaacgatgtactgaagatattattaaatcatgacgtaaatgtaacgatgaaaaccagtagcggacgtatgcctgtttatatattgcttactagatgttgtaatatttcacatgatgtagtgatagatatgatagacaaagataaaaaccacttattacatagagactattccaacctattactagagtatataaaatctcgttacatgttattgaaggaagaggatatcgatgagaacatagtatccactttattagataagggaatcgatcctaactttaaacaagacggatatacagcgttacattattattatttgtgtctcgcacacgtttataaactaggtgagtgtagaaaaccgataacgataaaaaaggccaagcgaattatttctttgtttatacaacatggagctaatctaaacgcgttagataattgtggtaatacaccattccatttgtatcttagtattgaaatgtgtaataatattcatatgactaaaatgctgttgacttttaatccgaatttcaaaatatgtaataatcatggattaacgcctatactatgttatataacttccgactacatacaacacgatattcttgttatgttaatacatcactatgaaacaaatgttggagaaatgccgatagatgagcgtcgtatgatcgtattcgagtttatcaaaacatattctacacgtccggcagattcgataacttatttgatgaataggtttaaaaatataaatatttatacccgctatgaaggaaagacattattacacgtagcatgtgaatataataatacacaagtaatagattatcttatacgtatcaacggagatataaatgcgttaaccgacaataacaaacacgctacacaactcattatagataacaaagaaaattccccatataccattaattgtttactgtatatacttagatatattgtagataagaatgtgataagatcgttggtggatcaacttccatctctacctatcttcgatataaaatcatttgagaaattcatatcctactgtatacttttagatgacacattttacgataggcacgttaagaatcgcgattctaaaacgtatcgatacgcattttcaaaatacatgtcgtttgataaatacgatggtataataactaaatgtcacgacgaaacaatgttactcaaactgtccactgttctagacactacactatatgcagttttaagatgtcataattcgagaaagttaagaagatacctcaacgagttaaaaaaatataataacgataagtcctttaaaatatattctaatattatgaatgagagataccttaatgtatattataaagatatgtacgtgtcaaaggtatatgataaactatttcctgttttcacagataaaaattgtctactaacattactaccttcagaaattatatacgaaatattatacatgctgacaattaacgatctttataatatatcgtatccacctaccaaagtatagttgtatttttctcatgcgatgtgtgtaaaaaaactgatattatataaatattttagtgccgtataataaagatgacgatgaaaatgatggtacatatatatttcgtatcattattgttattgctattccacagttacgccatagacatcgaaaatgaaatcacagaattcttcaataaaatgagagatactctaccagctaaagactctaaatggttgaatccagcatgtatgttcggaggcacaatgaatgatatagccgctctaggagagccattcagcgcaaagtgtcctcctattgaagacagtcttttatcgcacagatataaagactatgtggttaaatgggagaggctagaaaagaatagacggcgacaggtttctaataaacgtgttaaacatggtgatttatggatagccaactatacatctaaattcagtaaccgtaggtatttgtgcaccgtaactacaaagaatggtgactgtgttcagggtatagttagatctcatattaaaaaacctccttcatgcattccaaaaacatatgaactaggtactcatgataagtatggcatagacttatactgtggaattctttacgcaaaacattataataatataacttggtataaagataataaggaaattaatatcgacgacattaagtattcacaaacgggaaaggaattaattattcataatccagagttagaagatagcggaagatacgactgttacgttcattacgacgacgttagaatcaagaatgatatcgtagtatcaagatgtaaaatacttacggttataccgtcacaagaccacaggtttaaactaatactagatccgaaaatcaacgtaacgataggagaacctgccaatataacatgcactgctgtgtcaacgtcattattgatcgacgatgtactgattgaatgggaaaatccatccggatggcttataggattcgattttgatgtatactctgttttaactagtagaggcggtatcaccgaggcgaccttgtactttgaaaatgttactgaagaatatataggtaatacatataaatgtcgtggacacaactattattttgaaaaaacccttacaactacagtagtattggagtaaatatacaatgcatttttatatacattactgaattattattactgaattattattactgaattattattaattatatcgtatttgtgctatagaatggatgaagatacgcgactatctaggtatttgtatctcaccgatagagaacatataaatgtagactctattaaacagttgtgtaaaatatcagatcctaatgcatgttatagatgtggatgtacggctttacatgagtacttttataattatagatcagtcaacggaaaatacaagtatagatacaacggttactatcaatattattcatctagcgattatgaaaattataatgaatattattatgatagaactggtatgaacagtgagagtgataatatatcaatcaaaacagaatatgaattctatgatgaaacacaagatcaaagtacacaactagtaggttacgacattaaactcaaaaccaatgaggatgattttatggctatgatagatcagtgggtgtccatgattatatagatgaatcaattaataaagtagtatatggaagagagtctcacgtaagatggcgggatatatggcaagaacataatgatggcgtatacagtataggaaaggagtgcatagataatatatacgaagacaaccataccgtagacgaattctacaagatagacagcgtatcagatgtagatgacgcggaacacatatctccgataactaaaaaaccatagaatcagttgatgataatacctacatttctaatcttccgtataccatcaaatacaaaatattcgagcaacaataagtattttttatacctttaaaactgataaataaattttttctagtgatattttggcaagatgagaatcctatttctcatcgctttcatgtatgggtgtgttcactcatatgttaacgcggttgaaaccaaatgtccaaatctagacattgtaacatcttctggagaatttcattgttcaggatgtgtggaacatatgcctgagtttagctatatgtattggttggcaaaggatatgaaatcggacgaggataccaagtttatagaacatctgggtgatggcatcaaagaagatgaaaccgttcgtaccacagatagtggaatcgtcactctacgtaaagtccttcatgtgactgatactaataaatttgataattataggttcacttgtgtcctcgctacgctagatggcatttataaaaagaatgtttgctgaagtagttgtgtgctactatttttatttatgatataatctaatggaattaatttgaattgatatttatccaatactaaagattatattagaatcaaattaatcttttatacgagaaaaaataacgacatacgtcgtcaacaaattaaactttttatttattagttaactagcttatagaacttgctcattgttatgtttctaaaacgggtacggcatataggacaattatccgacgcaccggtttctcttcgtgttctatgccatatattgatgcatgttatgcaaaatatatgagtacacgaatccaataaaccaaagtatctatcgttttgagtaaacaacttcatagcaaattccacattctttttctttacttactctatacacgtcctcgtatttatttagtattttgatgatatccaactcagaaatggttgttgtattattgggtgtatttggagtataggtattattagctatgtaccaatttaccaaccctcttaatattgattgataatcacatcggttatccaattaataactaaattgtagtgtatatatagaccatatatgtttctatttttttgacagttacgtatagtttcagtaagttttgattgttgtattcctgtatctctagataagttagtcatatagtcccttccggcgatacgttttttccaagcccgaaattgattagccaaatgtgtatttatttttgtgatattgatataatatttcggataatgcatactgttagtcttatatcatttggttcatctatgtattgtaatattgttacatgatctatagatgatgtattgattttggcaggatcgaattccatatccgcgactaaacagtgaaaaaaatgtaaatactttttaaattttaaattagtaaaacttttttttattttttatgattccaaaaatactgaatacaaagtcctaaattataaatatggagatcatactaccacaacttattattatgtatacaaggccggtgtaatagatagatatatataattctattacaccggcagacaattaccgaccggtatttgtcgttaccaacataccgtataatatgtaatatacaattccataacccattgacagttgttatacatcaaaattgcaattcttttgattacgatgttataagaatgtagttaattgatgtatgatgttaatgtgtcctctttcctcttataacatcgtaatcaaaaacttttttataatatatacctaataatgtgtcttaatagttctcgtgattcgtcaaacaatcattcttataaaatataataaagcaacgtaaaaacacataaaaataagcgtaactaataagacaatggatatttacgacgataaaggtctacagactattaaactgtttaataatgaatttgattgtataaggaatgacatcagagaattatttaaacatgtaactgattccgatagtatacaacttccgatggaagacaattctgatattatagaaaatatcagaaaaatactatatagacgattaaaaaatgtagaatgtgttgacatcgataacacaataacttttatgaaatacgatccaaatgatgataataagcgtacgtgttctaattgggtacccttaactaataactatatggaatattgtctagtaatatatttggaaacaccgatatgtggaggcaaaataaaattataccaccctacaggaaatataaagtcggataaggatattatgtttgcaaagactctagactttaaatcaacgaaagtgttaactggacgtaaaacaattgccgttctagacatatccgtttcatataatagatcaatgactactattcactacaacgacgacgttgatatagatatacatactgataaaaatggaaaagagttatgttattgttatataacaatagatgatcattacttggttgatgtggaaactataggagttatagtcaatagatctggaaaatgtctgttagtaaataaccatctaggtataggtatcgttaaagataaacgtataagcgatagttttggagatgtatgtatggatacaatatttgacttttctgaagcacgagagttattttcattaactaatgatgataacaggaatatagcatgggacactgataaactagacgatgatacagatatatggactcccgtcacagaagatgattacaaatttctttctagactagtattgtatgcaaaatctcaatcggatactgtatttgactattatgttcttactggtgatacggaaccacccactgtattcattttcaaggtaactagattttactttaatatgccgaaataaaaaatttttgtataatatctagaggtagaggtattgtttagataaatacaaataacatagatacatcgcatacttagcatttttataaatatacataagacatacactttatacatttttgtaaaaatactcataaaaaaatttataaaaattatggcacaaccatatcttgtataggtagtttagttcgtcgagtgaacctataaacagataatagacaacacataataatgcctactaatacaagcataataccgggagatgggatatatgacgttgtagtgtttgggttttctgaacgttgatagtctactaatactacatgctgacatctaatgcctgtataaccatgagagcatctacaatacataccgtcaatatctctagcgtggatacagtcaccgtgtaaacaatatccatctccctctggaccgcataatctgatagctggaatatctgttgtagcgtttgtaatttctggcaatgtcgtttcgatagcgttaccactatcggcgaatgatctgattatcatagcagcgaacaacaacatcagataatttatcaacatttttgatggattctgtgtttatgctgtttctcagtgtgtgtttatgacaagattgggaattttatattattaattcagtaatataaactaataatatattgttaattgtgtaaataatataaaaataacaatacaatattgaatgtgttgctgttaaaaatgtatgtgttaatataatagaataaaataaatgagtatgatcattttagataacgattgattttatcattaccgcttcattcttatattctttgcttacggaacctatatttagaaacatctactaacaattttttatgcttgcattattaatggtatgtaatatgattgattgtgtacgcaataccaatttgttaagtatgaatacggggtacaaacataaattgaaatttaacattatttatttatgatatatatcgttatcgttaggtctataccatggatatctttaaagaactaatcttaaaacaccctgatgaaaatgttttgatttctccagtttccattttatctactttatctattctaaatcatggagcagctggttctacagctgaacaactatcaaaatatatagagaatatgaatgagaatacacccgatgacaataatgatgacatggaggtagatattccgtattgtgcgacactagctaccgcaaataaaatatacggtagcgatagtatcgagttccacgcctccttcctacaaaaaataaaagacgattttcaaactgtaaactttaataatgctaaccaaacaaaggaactaatcaacgaatgggttaagacaatgacaaatggtaaaattaattccttattgactagtccgctatccattaatactcgtatgacagttgttagcgccgtccattttaaagcaatgtggaaatatccattttctaaacatcttacatatacagacaagttttatatttctaagaatatagttaccagcgttgatatgatggtgggtaccgagaataacttgcaatatgtacatattaatgaattattcggaggattctctattatcgatattccatacgagggaaactctagtatggtaattatactaccggacgacatagaaggtatatataacatagaaaaaaatataacagatgaaaaatttaaaaaatggtgtggtatgttatctactaaaagtatagacttgtatatgccaaagtttaaagtggaaatgacagaaccgtataatctggtaccgattttagaaaatttaggacttactaatatattcggatattatgcagattttagcaagatgtgtaatgaaactatcactgtagaaaaatttctacatacgacgtttatagatgttaatgaggagtatacagaagcatcggccgttacaggagtatttacgattaacttttcgatggtatatcgtacgaaggtctacataaaccatccattcatgtacatgattaaagacaccacaggacgtatactttttatagggaaatactgctatccgcaataaatataaacaaatagacttttataaagagtcttcaacgataagtatatcgacatactacttatgctgcgaaagattctgaacgagaacgactatctcaccctcttggatcatatccgcactgctaaatactaaatctccactacactttttatcatcttatgaggaatgattgccttcgtgaaataggaataattagcaccagaatagctatggattattgtggtagagagtgcactattctatgtcgtctactggatgaagatgtgacgtacaaaaaaataaaactagaaattgaaacgtgtcacaacttatcaaaacatatagatagacgaggaaacaatgcgctacattgttacgtctccaataaatgcgatacagacattaagattgttctctcgcggagtcgagagactttgtagaaacaacgaaggattaactccgctaggagtatacagtaagcatagatacgtaaaatctcagattgtgcatctactgatatccagctattcaaattcctctaacgaactcaagtcgaatataaatgatttcgatctgtattcggataatatcgacttacgtctgctaaaatacctaattgtggataaacggatacgtccgtccaagaatacgaattatgcaatcaatggtctcggattggtggatatatacgtaacgacgcctaatccgagaccagaagtattgctatggcttcttaaatcagaatgttacagcaccggttacgtatttcgtacctgtatgtacgacagtgatatgtgtaagaactctcttcattactatatatcgtctcatagagaatctcaatctctatccaaggatgtaattaaatgtttgatcgataacaatgtttccatccatggcagagacgaaggaggatctttacccatccaatactactggtctttctcaaccatagatatagagattgttaaattattattaataaaggatgtggacacgtgtagagtatacgacgtcagccctatattagaggcgtattatctaaacaagcgatttagagtaaccccatataatgtagacatggaaatcgttaatcttcttattgagagacgtcatactcttgtcgacgtaatgcgtagtattacttcgtacgattccagagaatataaccactacatcatcgataacattctaaagagatttagacaacaggatgaatccatcgtacaagccatactgataaactacttacattacggcgatatggtcgttcgatgcatgttagataacggacaacaactatcctctacacgactactttgttaataataatctcgtcgatgtaaacgtcgtaaggtttatcgtggaaaatatggacacgcggctgtaaatcacgtatcgaacaatggccgtctatgtatgtacggtctgatattatcgagatttaataattgcgggtatcactgttatgaaaccatactgatagatgtatttgatatactaagcaagtacatggatgatatagatatgatcgataactctactatattacgcggtcgatgtcaataatatacaatttgcaaagcggttattggaatatggagcgagtatcacgctcgataatcaatacggccatccagaaaagcagttacagaagagaaaacaaaacgaaatcgttgttctacaagatgtctctccctacgacgattactacgtaaaaaagatactagcctactgcctattaagggacgagtcattcgcggaactacatagtaaattctgtttaaacgaggactataaaagtgtatttatgaaaaatatatcattcgataagatagattccatcatcgtgacataagtcgcctcaaagagattcgaatctccgacaccgacctgtatacggtatcacagctatcttaaagccatacattcagacagtcacatttcatttcccatgtacgacgatctcatagaacagtgccatctatcgatggagcgtaaaagtaaactcgtcgacaaagcactcaataaattagagtctaccatcggtcaatctagactatcgtatttgcctccggaaattatgcgcaatatcatctaaacagtatgttgtacggaaagaaccattacaaatattatccatgatagaaagaaaatatctatatgattggagaagtaggaaacaggaacaagacaacgattactacattattaaatcatgaagtccgtattatactcgtatatattgtttctctcatgtataataataaacggaagagatatagcaccgcatgcaccatccgatggaaagtgtaaagacaacgaatacaaacgccataatttgtgtccgggaacatacgcttccagattatgcgatagcaagactaacacacgatgtacgccgtgtggttcgggtaccttcacatctcgcaataatcatttacccgcttgtctaagttgtaacggaagacgcgatcgtgtaacacgactcacaatagaatctgtgaatgctctcccggatattattgtcttctcaaaggatcatccggatgcaaggcatgtgtttcccaaacaaaatgtggaataggatacggagtatccggagacgtcatctgttctccgtgtggtctcggaacatattctcacaccgtctcttccgcagataaatgcgaacccgtacccagaaatacgtttaactatatcgatgtggaaattaacctgtatccagttaacgacacgtcgtgtactcggacgaccactaccggtctcagcgaatccatctcaacgtcggaactaactattactatgaatcataaagactgtaatcccgtatttcgtgatggatacttctccgttcttaataaggtagcgacttcaggtttctttacaggagaaaggtgtgcactctgaatttcgagattaaatgcaataacaaagattcttcctccaaacagttaacgaaagcaaagaatgatactatcatgccgcattcggagacagtaactctagtgggcgacatctatatactatatagtaataccaatactcaagactacgaaactgatacaatctcttatcatgtgggtaatgttctcgatgtcgatagccatatgcccggtagttgcgatatacataaactgatcactaattccaaacccacccactttttatagtaagtttttcacccataaataataaatacaataattaatttctcgtaaaagtagaaaatatattctaatttattgcacggtaaggaagtagaatcataaagaacagtactcaatcaatagcaattatgaaacaatatatcgtcctggcatgcatgtgcctggcggcagctgctatgcctgccagtcttcagcaatcatcctcatcctcctcctcgtgtacggaagaagaaaacaaacatcatatgggaatcgatgttattatcaaagtcacaaagcaagaccaaacaccgaccaatgataagatttgccaatccgtaacggaaattacagagtccgagtcagatccagatcccgaggtggaatcagaagatgattccacatcagtcgaggatgtagatcctcctaccacttattactccatcatcggtggaggtctgagaatgaactttggattcaccaaatgtcctcagattaaatccatctcagaatccgctgatggaaacacagtgaatgctagattgtccagcgtgtccccaggacaaggtaaggactctcccgcgatcactcatgaagaagctcttgctatgatcaaagactgtgaagtgtctatcgacatcagatgtagcgaagaagagaaagacagcgacatcaagacccatccagtactcgggtctaacatctctcataagaaagtgagttacgaagatatcatcggttcaacgatcgtcgatacaaaatgcgtcaagaatctagagtttagcgttcgtatcggagacatgtgcaaggaatcatctgaacttgaggtcaaggatggattcaagtatgtcgacggatcggcatctgaaggtgcaaccgatgatacttcactcatcgattcaacaaaactcaaagcgtgtgtctgaatcgataactctattcatctgaaattggatgagtagggttaatcgaacgattcaggcacaccacgaattaaaaaagtgtaccggacactatattccggtttgcaaaacaaaaatgttcttaactacattcacaaaaagttacctctcgcgacttcttctttttctgtctcaatagtgtgatacgattatgacactattcctattcctattcctatttcctttcagagtatcacaaaaatattaaacctctttctgatggtctcataaaaaaagttttacaaaaatatttttattctctttctctctttgatggtctcataaaaaaagttttacaaaaatatttttattctctttctctctttgatggtctcataaaaaaagttttacaaaaatatttttattctctttctctctttgatggtctcataaaaaaagttttacaaaaatatttttattctctttctctctttgatggtctcataaaaaaagttttacaaaaatatttttattctctttctctctttgatggtctcataaaaaaagttttacaaaaatatttttattctctttctctctttgatggtctcataaaaaaagttttacaaaaatatttttattctctttctctctttgatggtctcataaaaaaagttttacaaaaatatttttattctctttctctctttgatggtctcataaaaaaagttttacaaaaatatttttattctctttctctctttgatggtctcataaaaaaagttttacaaaaatatttttattctctttctctctttgatggtctcataaaaaaagttttacaaaaatatttttattctctttctctctttgatggtctcataaaaaaagttttacaaaaatatttttattctctttctctctttgatggtctcataaaaaagttttacaaaaatatttttattctctttctctctttgatggtctcataaaaaagttttacaaaaatatttttattctctttctctctttgatggtctcataaaaaaagttttacaaaaatatttttattctctttctctctttgatggtctcataa

SEQ ID NO: 17 - DNA, 195777 bp, Artificial Sequence
  GLV-1h312
ttatgagaccatcaaagagagaaagagaataaaaatatttttgtaaaactttttttatgagaccatcaaagagagaaagagaataaaaatatttttgtaaaacttttttatgagaccatcaaagagagaaagagaataaaaatatttttgtaaaacttttttatgagaccatcaaagagagaaagagaataaaaatatttttgtaaaactttttttatgagaccatcaaagagagaaagagaataaaaatatttttgtaaaactttttttatgagaccatcaaagagagaaagagaataaaaatatttttgtaaaactttttttatgagaccatcaaagagagaaagagaataaaaatatttttgtaaaactttttttatgagaccatcaaagagagaaagagaataaaaatatttttgtaaaactttttttatgagaccatcaaagagagaaagagaataaaaatatttttgtaaaactttttttatgagaccatcaaagagagaaagagaataaaaatatttttgtaaaactttttttatgagaccatcaaagagagaaagagaataaaaatatttttgtaaaactttttttatgagaccatcaaagagagaaagagaataaaaatatttttgtaaaactttttttatgagaccatcaaagagagaaagagaataaaaatatttttgtaaaactttttttatgagaccatcaaagagagaaagagaataaaaatatttttgtaaaactttttttatgagaccatcaaagagagaaagagaataaaaatatttttgtaaaactttttttatgagaccatcagaaagaggtttaatatttttgtgatactctgaaaggaaataggaataggaataggaatagtgtcataatcgtatcacactattgagacagaaaaagaagaagtcgcgagaggtaactttttgtgaatgtagttaagaacatttttgttttgcaaaccggaatatagtgtccggtacacttttttaattcgtggtgtgcctgaatcgttcgattaaccctactcatccaatttcagatgaatagagttatcgattcagacacacgctttgagttttgttgaatcgatgagtgaagtatcatcggttgcaccttcagatgccgatccgtcgacatacttgaatccatccttgacctcaagttcagatgattccttgcacatgtctccgatacgaacgctaaactctagattcttgacgcattttgtatcgacgatcgttgaaccgatgatatcttcgtaactcactttcttatgagagatgttagacccgagtactggatgggtcttgatgtcgctgtctttctcttcttcgctacatctgatgtcgatagacacttcacagtctttgatcatagcaagagcttcttcatgagtgatcgcgggagagtccttaccttgtcctggggacacgctggacaatctagcattcactgtgtttccatcagcggattctgagatggatttaatctgaggacatttggtgaatccaaagttcattctcagacctccaccgatgatggagtaataagtggtaggaggatctacatcctcgactgatgtggaatcatcttctgattccacctcgggatctggatctgactcggactctgtaatttccgttacggattggcaaatcttatcattggtcggtgtttggtcttgctttgtgactttgataataacatcgattcccatatgatgtttgttttcttcttccgtacacgaggaggaggatgaggatgattgctgaagactggcaggcatagcagctgccgccaggcacatgcatgccaggacgatatattgtttcataattgctattgattgagtactgttctttatgattctacttccttaccgtgcaataaattagaatatattttctacttttacgagaaattaattattgtatttattatttatgggtgaaaaacttactataaaaagtgggtgggtttggaattagtgatcagtttatgtatatcgcaactaccgggcatatggctatcgacatcgagaacattacccacatgataagagattgtatcagtttcgtagtcttgagtattggtattactatatagtatatagatgtcgcccactagagttactgtctccgaatgcggcatgatagtatcattctttgctttcgttaactgtttggaggaagaatctttgttattgcatttaatctcgaaattcagagtgcacacctttctcctgtaaagaaacctgaagtcgctaccttattaagaacggagaagtatccatcacgaaatacgggattacagtctttatgattcatagtaatagttagttccgacgttgagatggattcgctgagaccggtagtggtcgtccgagtacacgacgtgtcgttaactggatacaggttaatttccacatcgatatagttaaacgtatttctgggtacgggttcgcatttatctgcggaagagacggtgtgagaatatgttccgagaccacacggagaacagatgacgtctccggatactccgtatcctattccacattttgtttgggaaacacatgccttgcatccggatgatcctttgagaagacaataatatccgggagagcattcacagattctattgtgagtcgtgttacacgatcgcgtcttccgttacaacttagacaagcgggtaaatgattattgcgagatgtgaaggtacccgaaccacacggcgtacatcgtgtgttagtcttgctatcgcataatctggaagcgtatgttcccggacacaaattatggcgtttgtattcgttgtctttacactttccatcggatggtgcatgcggtgctatatctcttccgtttattattatacatgagagaaacaatatatacgagtataatacggacttcatgatttaataatgtagtaatcgttgtcttgttcctgtttcctacttctccaatcatatagatattttctttctatcatggataatatttgtaatggttctttccgtacaacatactgtttagatgatattgcgcataatttccggaggcaaatacgatagtctagattgaccgatggtagactctaatttattgagtgctttgtcgacgagtttacttttacgctccatcgatagatggcactgttctatgagatcgtcgtacatgggaaatgaaatgtgactgtctgaatgtatggctttaagatagctgtgataccgtatacaggtcggtgtcggagattcgaatctctttgaggcgacttatgtcacgatgatggaatctatcttatcgaatgatatatttttcataaatacacttttatagtcctcgtttaaacagaatttactatgtagttccgcgaatgactcgtcccttaataggcagtaggctagtatcttttttacgtagtaatcgtcgtagggagagacatcttgtagaacaacgatttcgttttgttttctcttctgtaactgcttttctggatggccgtattgattatcgagcgtgatactcgctccatattccaataaccgctttgcaaattgtatattattgacatcgaccgcgtaatatagtagagttatcgatcatatctatatcatccatgtacttgcttagtatatcaaatacatctatcagtatggtttcataacagtgatacccgcaattattaaatctcgataatatcagaccgtacatacatagacggccattgttcgatacgtgatttacagccgcgtgtccatattttccacgataaaccttacgacgtttacatcgacgagattattattaacaaagtagtcgtgtagaggatagttgttgtccgttatctaacatgcatcgaacgaccatatcgccgtaatgtaagtagtttatcagtatggcttgtacgatggattcatcctgttgtctaaatctctttagaatgttatcgatgatgtagtggttatattctctggaatcgtacgaagtaatactacgcattacgtcgacaagagtatgacgtctctcaataagaagattaacgatttccatgtctacattatatggggttactctaaatcgcttgtttagataatacgcctctaatatagggctgacgtcgtatactctacacgtgtccacatcctttattaataataatttaacaatctctatatctatggttgagaaagaccagtagtattggatgggtaaagatcctccttcgtctctgccatggatggaaacattgttatcgatcaaacatttaattacatccttggatagagattgagattctctatgagacgatatatagtaatgaagagagttcttacacatatcactgtcgtacatacaggtacgaaatacgtaaccggtgctgtaacattctgatttaagaagccatagcaatacttctggtctcggattaggcgtcgttacgtatatatccaccaatccgagaccattgattgcataattcgtattcttggacggacgtatccgtttatccacaattaggtattttagcagacgtaagtcgatattatccgaatacagatcgaaatcatttatattcgacttgagttcgttagaggaatttgaatagctggatatcagtagatgcacaatctgagattttacgtatctatgcttactgtatactcctagcggagttaatccttcgttgtttctacaaagtctctcgactccgcgagagaacaatcttaatgtctgtatcgcatttattggagacgtaacaatgtagcgcattgtttcctcgtctatctatatgttttgataagttgtgacacgtttcaatttctagttttatttttttgtacgtcacatcttcatccagtagacgacatagaatagtgcactctctaccacaataatccatagctattctggtgctaattattcctatttcacgaaggcaatcattcctcataagatgataaaaagtgtagtggagatttagtatttagcagtgcggatatgatccaagagggtgagatagtcgttctcgttcagaatctttcgcagcataagtagtatgtcgatatacttatcgttgaagactctttataaaagtctatttgtttatatttattgcggatagcagtatttccctataaaaagtatacgtcctgtggtgtctttaatcatgtacatgaatggatggtttatgtagaccttcgtacgatataccatcgaaaagttaatcgtaaatactcctgtaacggccgatgcttctgtatactcctcattaacatctataaacgtcgtatgtagaaatttttctacagtgatagtttcattacacatcttgctaaaatctgcataatatccgaatatattagtaagtcctaaattttctaaaatcggtaccagattatacggttctgtcatttccactttaaactttggcatatacaagtctatacttttagtagataacataccacaccattttttaaatttttcatctgttatatttttttctatgttatatataccttctatgtcgtccggtagtataattaccatactagagtttccctcgtatggaatatcgataatagagaatcctccgaataattcattaatatgtacatattgcaagttattctcggtacccaccatcatatcaacgctggtaactatattcttagaaatataaaacttgtctgtatatgtaagatgtttagaaaatggatatttccacattgctttaaaatggacggcgctaacaactgtcatacgagtattaatggatagcggactagtcaataaggaattaattttaccatttgtcattgtcttaacccattcgttgattagttcctttgtttggttagcattattaaagtttacagtttgaaaatcgtcttttattttttgtaggaaggaggcgtggaactcgatactatcgctaccgtatattttatttgcggtagctagtgtcgcacaatacggaatatctacctccatgtcatcattattgtcatcgggtgtattctcattcatattctctatatattttgatagttgttcagctgtagaaccagctgctccatgatttagaatagataaagtagataaaatggaaactggagaaatcaaaacattttcatcagggtgttttaagattagttctttaaagatatccatggtatagacctaacgataacgatatatatcataaataaataatgttaaatttcaatttatgtttgtaccccgtattcatacttaacaaattggtattgcgtacacaatcaatcatattacataccattaataatgcaagcataaaaaattgttagtagatgtttctaaatataggttccgtaagcaaagaatataagaatgaagcggtaatgataaaatcaatcgttatctaaaatgatcatactcatttattttattctattatattaacacatacatttttaacagcaacacattcaatattgtattgttatttttatattatttacacaattaacaatatattattagtttatattactgaattaataatataaaattcccaatcttgtcataaacacacactgagaaacagcataaacacagaatccatcaaaaatgttgataaattatctgatgttgttgttcgctgctatgataatcagatcattcgccgatagtggtaacgctatcgaaacgacattgccagaaattacaaacgctacaacagatattccagctatcagattatgcggtccagagggagatggatattgtttacacggtgactgtatccacgctagagatattgacggtatgtattgtagatgctctcatggttatacaggcattagatgtcagcatgtagtattagtagactatcaacgttcagaaaacccaaacactacaacgtcatatatcccatctcccggtattatgcttgtattagtaggcattattatgtgttgtctattatctgtttataggttcactcgacgaactaaactacctatacaagatatggttgtgccataatttttataaatttttttatgagtatttttacaaaaatgtataaagtgtatgtcttatgtatatttataaaaatgctaagtatgcgatgtatctatgttatttgtatttatctaaacaatacctctacctctagatattatacaaaaattttttatttcggcatattaaagtaaaatctagttaccttgaaaatgaatacagtgggtggttccgtatcaccagtaagaacataatagtcaaatacagtatccgattgagattttgcatacaatactagtctagaaagaaatttgtaatcatcttctgtgacgggagtccatatatctgtatcatcgtctagtttatcagtgtcccatgctatattcctgttatcatcattagttaatgaaaataactctcgtgcttcagaaaagtcaaatattgtatccatacatacatctccaaaactatcgcttatacgtttatctttaacgatacctatacctagatggttatttactaacagacattttccagatctattgactataactcctatagtttccacatcaaccaagtaatgatcatctattgttatataacaataacataactcttttccatttttatcagtatgtatatctatatcaacgtcgtcgttgtagtgaatagtagtcattgatctattatatgaaacggatatgtctagaacggcaattgttttacgtccagttaacactttcgttgatttaaagtctagagtctttgcaaacataatatccttatccgactttatatttcctgtagggtggtataattttattttgcctccacatatcggtgtttccaaatatattactagacaatattccatatagttattagttaagggtacccaattagaacacgtacgcttattatcatcatttggatcgtatttcataaaagttattgtgttatcgatgtcaacacattctacattttttaatcgtctatatagtatttttctgatattttctataatatcagaattgtcttccatcggaagttgtatactatcggaatcagttacatgtttaaataattctctgatgtcattccttatacaatcaaattcattattaaacagtttaatagtctgtagacctttatcgtcgtaaatatccattgtcttattagttacgcttatttttatgtgtttttacgttgctttattatattttataagaatgattgtttgacgaatcacgagaactattaagacacattattaggtatatattataaaaaagtttttgattacgatgttataagaggaaagaggacacattaacatcatacatcaattaactacattcttataacatcgtaatcaaaagaattgcaattttgatgtataacaactgtcaatgggttatggaattgtatattacatattatacggtatgttggtaacgacaaataccggtcggtaattgtctgccggtgtaatagaattatatatatctatctattacaccggccttgtatacataataataagttgtggtagtatgatctccatatttataatttaggactttgtattcagtatttttggaatcataaaaaataaaaaaaagttttactaatttaaaatttaaaaagtatttacatttttttcactgtttagtcgcggatatggaattcgatcctgccaaaatcaatacatcatctatagatcatgtaacaatattacaatacatagatgaaccaaatgatataagactaacagtatgcattatccgaaatattatatcaatatcacaaaaataaatacacatttggctaatcaatttcgggcttggaaaaaacgtatcgccggaagggactatatgactaacttatctagagatacaggaatacaacaatcaaaacttactgaaactatacgtaactgtcaaaaaaatagaaacatatatggtctatatatacactacaatttagttattaattggataaccgatgtgattatcaatcaatattaagagggttggtaaattggtacatagctaataatacctatactccaaatacacccaataatacaacaaccatttctgagttggatatcatcaaaatactaaataaatacgaggacgtgtatagagtaagtaaagaaaaagaatgtggaatttgctatgaagttgtttactcaaaacgatagatactttggtttattggattcgtgtactcatatattttgcataacatgcatcaatatatggcatagaacacgaagagaaaccggtgcgtcggataattgtcctatatgccgtacccgttttagaaacataacaatgagcaagttctataagctagttaactaataaataaaaagtttaatttgttgacgacgtatgtcgttattttttctcgtataaaagattaatttgattctaatataatctttagtattggataaatatcaattcaaattaattccattagattatatcataaataaaaatagtagcacacaactacttcagcaaacattctttttataaatgccatctagcgtagcgaggacacaagtgaacctataattatcaaatttattagtatcagtcacatgaaggactttacgtagagtgacgattccactatctgtggtacgaacggtttcatcttctttgatgccatcacccagatgttctataaacttggtatcctcgtccgatttcatatcctttgccaaccaatacatatagctaaactcaggcatatgttccacacatcctgaacaatgaaattctccagaagatgttacaatgtctagatttggacatttggtttcaaccgcgttaacatatgagtgaacacacccatacatgaaagcgatgagaaataggattctcatcttgccaaaatatcactagaaaaaatttatttatcagttttaaaggtataaaaaatacttattgttgctcgaatattttgtatttgatggtatacggaagattagaaatgtaggtattatcatcaactgattctatggttttatgtattctatcatgtttcactattgcgttggaaataatatcatatgcttccacatatattttattttgttttaactcataatactcacgtaattctggattattggcatatctatgaataattttagctccatgatcagtaaatattaatgagaacatagtattaccacctaccattatttttttcatctcattcaattcttaattgcaaagatctatataatcattatagcgttgacttatggactctggaatcttagacgatgtacagtcatctataatcatggcatatttaatacattgttttatagcatagtcgttatctacgatgttagatatttctctcaatgaatcaatcacacaatctaatgtaggtttatgacataatagcattttcagcagttcaatgtttttagattcgttgatggcaatggctatacatgtatatccgttatttgatctaatgttgacatctgaaccggattctagcagtaaagatactagagattgtttattatatctaacagccttgtgaagaagtgtttctcctcgtttgtcaatcatgttaatgtctttaagataaggtaggcaaatgtttatagtactaagaattgggcaagcataagacatgtcacaaagacccttttttgtatgtataagtgtaaaaattataacatccatagttggatttacataggtgtccaatcgggatctctccatcatcgagataattgatggcatctcccttccttttttagtagatatttcatcgtgtaagaatcaatattaatatttctaaagtatccgtgtatagcctctttatttaccacagctccatattccactagagggatatcgccgaatgtcatatactcaattagtatatgttggaggacatccgagttcattgttttcaatatcaaagagatggtttccttatcatttctccatagtggtacaatactacacattattccgtgcggctttccattttccaaaaacaatttgaccaaatctaaatctacatctttattgtatctataatcactatttagataatcagccataattcctcgagtgcaacatgttagatcgtctatatatgaataagcagtgttatctattcctttcattaacaatttaacgatgtctatatctatatgagatgacttaatataatattgaagagctgtacaatagtttttatctataaaagacggcttgattccgtgattaattagacatttaacaacttccggacgcacatatgctctcgtatccgactctgaatacagatgagagatgatatacagatgcaatacggtaccgcaatttcgtagttgataatcatcatacgcgtatcagtactcgtcctcataaagaacactgcagccattttctatgaacaaatcaataattttagaaacaggatcattgtcattacataattttctataactgaacgatggttttcacatttaacactcaagtcaaatccatgttctaccaacacctttatcaagtcaacgtctacatttttggatttcatatagctgaatatattaaagttatttatgttgctaaatccagtggcttctagtagagccatcgctatatccttattaactttaacatgtctactatttgtgtattcttctaatggggtaagctgtctccaatttttgcgtaatggattagtgccactgtctagtagtagtttgacgacctcgacattattacaatgctcattaaaaaggtatgcgtgtaaagcattattcttgaattggttcctggtatcattaggatctctgtctttcaacatctgtttaagttcatcaagagccacctcctcattttccaaatagtcaaacattttgactgaatgagctactgtgaactctatacacccacacaactaatgtcattaaatatcatgtcaaaaacttgtacaattattaataaaaataatttagtgtttaaattttaccagttccagattttacacctccgttaatacctccattaaccccactggacgatcctcctccccacattccaccgccaccagatgtataagttttagatcctttattactaccatcatgtccatggataaagacactccacatgccgccactaccccctttagaagacatattaataagacttaaggacaagtttaacaataaaattaatcacgagtaccctactaccaacctacactattatatgattatagtttctatttttacagtaccttgactaaagtttctagtcacaagagcaatactaccaacctacactattatatgattatagtttctatttttataggaacgcgtacgagaaaatcaaatgtctaatttctaacggtagtgttgataaacgattgttatccgcggatacctcctctatcatgtcgtctattttcttactttgttctattaacttattagcattatatattatttgattataaaacttatattgcttattagcccaatctgtaaatatcggattattaacatatcgtttctttgtaggtttatttaacatgtacatcactgtaagcatgtccttaccatttattttaatttgacgcatatccgcaatttctttttcgcagtcggttataaattctatatatgatggatacatgctacatgtgtacttataatcgactaatatgaagtacttgatacatattttcagtaacgatttattattaccacctatgaataagtacctgtgatcgtctaggtaatcaactgttttcttaatacattcgatggttggtaatttactcagaataatttccaatatcttaatatataattctgctatttctgggatatatttatctgccagtataacacaaatagtaatacatgtaaacccatattttgttattatattaatgtctgcgccattatctattaaccattctactaggctgacactatgcgactcaatacaatgataaagtatactacatccatgtttatctattttgtttatatcatcaatatacggcttacaaagttttagtatcgataacacatccaactcacgcatagagaaggtagggaataatggcataatatttattaggttatcatcattgtcattatctacaactaagtttccattttttaaaatatactcgacaactttaggatctctattgccaaatttttgaaaatatttatttatatgcttaaatctatataatgtagctccttcatcaatcatacatttaataacattgatgtatactgtatgataagatacatattctaacaatagatcttgtatagaatctgtatatcttttaagaattgtggatattaggatattattacataaactattacacaattctaaaatataaaacgtatcacggtcgaataatagttgatcaactatataattatcgattttgtgatttttcttcctaaactgtttacgtaaatagttagatagaatattcattagttcatgaccactatagttactatcgaataacgcgtcaaatatttcccgtttaatatcgcatttgtcaagataataatagagtgtggtatgttcacgataagtataataacgcatctctttttcgtgtgaaattaaatagtttattacgtccaaagatgtagcataaccatcttgtgacctagtaataatataataatagagaactgttttacccattctatcatcataatcagtggtgtagtcgtaatcgtaatcgtctaattcatcatcccaattataatattcaccagcacgtctaatctgttctattttgatcttgtatccatactgtatgttgctacatgtaggtattcctttatccaataatagtttaaacacatctacattgggatttgatgttgtagcgtatttttctacaatattaataccatttttgatactatttatttctatacctttcgaaattagtaatttcaataagtctatattgatgttatcagaacatagatattcgaatatatcaaaatcattgatatttttatagtcgactgacgacaataacaaaatcacaacatcgtttttgatattattatttttcttggtaacgtatgcctttaatggagtttcaccatcatactcatataatggatttgcaccactttctatcaatgattgtgcactgctggcatcgatgttaaatgttttacaactatcatagagtatcttatcgttaaccatgattggttgttgatgctatcgcattttttggtttctttcatttcagttatgtatggatttagcacgtttgggaagcatgagctcatatgatttcagtactgtagtgtcagtactattagtttcaataagatcaatctctagatctatagaatcaaaacacgataggtcagaagataatgaatatctgtaggcttcttgttgtactgtaacttctggttttgttagatggttgcatcgtgctttaacgtcaatggtacaaattttatcctcgctttgtgtatcatattcgtccctactataaaattgtatattcagattatcatgcgatgtgtatacgctaacggtatcaataaacggagcacaccatttagtcataaccgtaatccaaaaatttttaaagtatatcttaacgaaagaagttgtgtcattgtctacggtgtatggtactagatcctcataagtgtatatatctagagtaatgtttaatttattaaatggttgataatatggatcctcgtgacaatttccgaagatggaaataagacataaacacgcaataaatctaattgcggacatggttactccttaaaaaaatacgaataatcaccttggctatttagtaagtgtcatttaacactatactcatattaatccatggactcataatctctatacgggattaacggatgttctatatacggggatgagtagttctcttctttaactttatactttttactaatcatatttagactgatgtatgggtaatagtgtttgaagagctcgttctcatcatcagaataaatcaatatctctgtttttttgttatacagatgtattacagcctcatatattacgtaatagaacgtgtcatctaccttattaactttcaccgcatagttgtttgcaaatacggttaatcctttgacctcgtcgatttccgaccaatctgggcgtataatgaatctaaactttaattgcttgtaatcattcgaaataatttttagtttgcatccgtagttatcccctttatgtaactgtaaatttctcaacgcgatatctccattaataatgatgtcgaattcgtgctgtatacccatactgaatggatgaacgaataccgacggcgttaatagtaatttactttttcatctttacatattgggtactagttttactatcataagtttataaattccacaagctactatggaataagccaaccatcttagtataccacacatgtcttaaagtttattaattaattacatgttgttttatatatatcgctacgaatttaaagagaaattagtttaggaagaaaaattatctatctacatcatcacgtctctgtattctacgatagagtgctactttaagatgcgacagatccgtgtcatcaaatatatactccattaaaatgattattccggcagcgaacttgatattggatatatcacaacctttgttaatatctacgacaatagacagcagtcccatggttccataaacagtgagtttatctttctttgaagagatattttgtagagatcttataaaactgtcgaatgacatcgcatttatatctttagctaaatcgtatatgttaccatcgtaatatctaaccgcgtctatcttaaacgtttccatcgctttaaagacgtttccgatagatggtctcatttcatcagtcatactgagccaacaaatataatcgtgtataacatctttgatagaatcagactctaaagaaaacgaatcggctttattatacgcattcatgataaacttaatgaaaaatgtttttcgttgtttaagttggatgaatagtatgtcttaataattgttattatttcattaattaatatttagtaacgagtacactctataaaaacgagaatgacataactaatcataactagttatcaaagtgtctaggacgcgtaattttcatatggtatagatcctgtaagcattgtctgtattctggagctattttctctatcgcattagtgagttcagaatatgttataaatttaaatcgaataacgaacataactttagtaaagtcgtctatattaactcttttattttctagccatcgtaataccatgtttaagatagtatattctctagttactacgatctcatcgttgtctagaatatcacatactgaatctacatccaattttagaaattggtctgtgttacatatctcttctatattattgttgatgtattgtcgtagaaaactattacgtagaccattttctttataaaacgaatatatagtactccaattatctttaccgatatatttgcacacataatccattctctcaatcactacatctttaagattttcgttgttaagatatttggctaaactatataattctattagatcatcaacagaatcagtatatatttttctagatccaaagacgaactctttggcgtcctctataatattcccagaaaagatattttcgtgttttagtttatcgagatctgatctgttcatatacgccatgattgtacggtacgttatgataaccgcataaaataaaaatccattttcatttttaaccaatactattcataattgagattgatgtaatactttgttactttgaacgtaaagacagtacacggatccgtatctccaacaagcacgtagtaatcaaatttggtgttgttaaacttcgcaatattcatcaatttagatagaaacttatactcatcatctgttttaggaatccatgtattattaccactttccaacttatcattatcccaggctatgtttcgtccatcatcgttgcgcagagtgaataattcttttgtattcggtagttcaaatatatgatccatgcatagatcggcaaagctattgtagatgtgatttttcctaaatctaatataaaactcgtttactagcaaacactttcctgatttatcgaccaagacacatatggtttctaaatctatcaagtggtggggatccatagttatgacgcagtaacatatattattacattcttgactgtcgctaatatctaaatatttattgttatcgtattggattctgcatatagatggcttgtatgtcaaagatatagaacacataaccaatttatagtcgcgctttacattctcgaatctaaagttaagagatttagaaaacattatatcctcggatgatgttatcactgtttctggagtaggatatattaaagtctttacagatttcgtccgattcaaataaatcactaaataatatcccacattatcatctgttagagtagtatcattaaatctattatattttatgaaagatatatcactgctcacctctatatttcgtacatttttaaactgtttgtataatatctctctgatacaatcagatatatctattgtgtcggtagacgataccgttacatttgaattaatggtgttccattttacaacttttaacaagttgaccaattcatttctaatagtatcaaactctccatgattaaatattttaatagtatccattttatatcactacggacacaaagtagctgacataaaccattgtataatttttatgttttatgtttattagcgtacacattttggaagttccggcttccatgtatttcctggagagcaagtagatgatgaggaaccagatagtttatatccgtacttgcacttaaagtctacattgtcgttgtatgagtatgatcttttaaacccgctagacaagtatccgtttgatattgtaggatgtggacatttaacaatctgacacgtgggtggatcggaccattctcctcctgaacacaggacactagagttaccaatcaacgaatatccactattgcaactataagttacaacgctcccatcggtataaaaatcctcgtatccgttatgtcttccgttggatatagatggaggggattggcatttaacagattcacaaataggtgcctcgggattccataccatagatccagtagatcctaattcacaatacgatttagattcaccgatcaactgatatccgctattacaagagtacgttatactagagccaaagtctactccaccaatatcaagttggccattatcgatatctcgaggcgatgggcatctccgtttaatacattgattaaagagtgtccatccagtacctgtacatttagcatatataggtcccattttttgctttctgtatccaggtagacatagatattctatagtgtctcctatgttgtaattagcattagcatcagtctccacactattcttaaatttcatattaatgggtcgtgacggaatagtacagcatgatagaacgcatcctattcccaacaatgtcaggaacgtcacgctctccaccttcatatttatttatccgtaaaaatgttatcctggacatcgtacaaataataaaaagcccatatatgttcgctattgtagaaattgtttttcacagttgctcaaaaacgatggcagtgacttatgagttacgttacactttggagtctcatctttagtaaacatatcataatattcgatattacgagttgacatatcgaacaaattccaagtatttgattttggataatattcgtattttgcatctgctataattaagatataatcaccgcaagaacacacgaacatctttcctacatggttaaagtacatgtacaattctatccatttgtcttccttaactatatatttgtatagataattacgagtctcgtgagtaattccagtaattacatagatgtcgccgtcgtactctacagcataaactatactatgatgtctaggcatgggagacttttttatccaacgatttttagtgaaacattccacatcgtttaatactacatatttctcatacgtggtataaactccacccattacatatatatcatcgtttacgaataccgacgcgcctgaatatctaggagtaattaagtttggaagtcttatccatttcgaagtgccgtgtttcaaatattctgccacacccgttgaaatagaaaattctaatcctcctattacatataactttccatcgttaacacaagtactaacttctgattttaacgacgacatattagtaaccgttttccattttttcgttttaagatctacccgcgatacggaataaacatgtctattgttaatcatgccgccaataatgtatagacaattatgtaaaacatttgcattatagaattgtctatctgtattaccgactatcgtccaatattctgttctaggagagtaatgggttattgtggatatataatcagagtttttaatgactactatattatgttttataccatttcgtgtcactggctttgtagatttggatatagttaatcccaacaatgatatagcattgcgcatagtattagtcataaacttgggatgtaaaatgttgatgatatctacatcgtttggatttttatgtatccactttaataatatcatagctgtaacatcctcatgatttacgttaacgtcttcgtgggataagatagttgtcagttcatcctttgataattttccaaattctggatcggatgtcaccgcagtaatattgttgattatttctgacatcgacgcattatatagttttttaattccatatcttttagaaaagttaaacatccttatacaatttgtgaaattaatattatgaatcatagtttttacacatagatctactacaggcggaacatcaattattatggcagcaactagtatcatttctacattgtttatggtgatgtttatcttcttccagcgcatatagtctaatagcgattcaaacgcgtgatagtttataccattcaatataatcgcttcatcctttagatggtgatcctgaatgcgtttaaaaaaattatacggagacgccgtaataatttccttattcacttgtataatttccccattgatagaaaatattacgctttccattcttaaagtactataagtaattatagtataatgtaaacgtttatatattcaatatttttataaaaatcattttgacattaattcctttttaaatttccgtctatcatctatagaaacgtattctatgaatttataaaatgcttttacgtgtcctatcgtaggcgatagaaccgctaaaaagcctatcgaatttctacaaaagaatctgttatatggtatagggagagtataaaacattaaatgtccgtacttattaaagtattcagtagccaatcctaactctttcgaatacttattaatggctcttgttctgtacgaatctatttttttgaacaacggacctagtggtatatcttgttctatgtatctaaaataatgtctgactagatccgttagtttaatatccgcagtcatcttgtctagaatggcaaatctaactgcgggtttaggctttagtttagtttctatatctacatctatgtctttatctaacaccaaaaatataatagctaatattttattacaatcatccggatattcttctacgatctcactaactaatgtttctttggttatactagtatagtcactatcggacaaataaagaaaatcagatgatcgatgaataatacatttaaattcatcatctgtaagatttttgagatgtctcattagaatattattagggttagtactcattatcattcggcagctattacttattttattatttttcaccatatagatcaatcattagatcatcaaaatatgtttcaatcatcctaaagagtatggtgaatgactcttcccatctaatttctgaacgttcaccaatgtctctagccactttggcactaatagcgatcattcgcttagcgtcttctatattattaactggttgatttaatctatctagcaatggaccgtcggacagcgtcattctcatgttcttaatcaatgtacatacatcgccgtcatctaccaattcatccaacaacataagctttttaaaatcatcattataataggtttgatcgttgtcatttctccaaagaatatatctaataagtagagtcctcatgcttagttaacaactattttttatgttaaatcaattagtacaccgctatgtttaatacttattcatattttagtttttaggattgagaatcaatacaaaaattaatgcatcattaattttagaaatacttagtttccacgtagtcaatgaaacatttgaactcatcgtacaggacgttctcgtacaggacgtaactataaaccggtttatatttgttcaagatagatacaaatccgataactttttttacgaattctacgggatccactttaaaagtgtcataccgggttctttttatttttttaaacagatcaatggtgtgatgttgattaggtcttttacgaatttgatatagaatagcgtttacatattctccataatggtcaatcgccatttgttcgtatgtcataaattctttaattatatgacactgtgtattatttagttcatccttgttcattgttaggaatctatccaaaatggcaattatactagaactataggtgcgttgtatacacatattgatgtgtctgtttatacaatccatgatatttggatccatgctactaccttcgggtaaaattgtagcatcatataccatttctagtactttaggttcattattatccattgcagaggacgtcatgatcgaatcataaaaaaatatattatttttatgttattttgttaaaaataatcatcgaatacttcgtaagatactccttcatgaacataatcagttacaaaacgtttatatgaagtaaagtatctacgatttttacaaaagtccggatgcataagtacaaagtacgcgataaacggaataataatagatttatctagtctatctttttctatagctttcatagttagatacatggtctcagaagtaggattatgtaacatcagcttcgataaaatgactgggttatttagtcttacacattcgctcatacatgtatgaccgttaactacagagtctacactaaaatgattgaacaatagatagtctaccattgtttcgtattcagatagtacagcgtagtacatggcatcttcacaaattatatcattgtctaatagatatttgacgcatcttatggatcccacttcaacagccatcttaaaatcatattgctttcctttatcattaataatttctagaacatcatctctatcataaaagatacaaatattaactgtttgatccgtaataacattgctagtcaatagcaatttgttaataagatgcgctgggctcaatgtcttaataagaagtgtaagaggactatctccgaatttgttttgtttattaacatccgttgatggaagtaaaagatctataatgtctacattcttgactgttttagagcatacaatatggagaggtgtatttccatcatgatctggttttgagggactaattcctagtttcatcatccatgagattgtagaagcttttggattgtctgacataagatgtctatgaatatgatttttgccaaatttatccactatcctggcttcgaatccgatggacattatttttttaaacactctttctgaaggatctgtacacgccaacaacggaccacatccttcttcatcaaccgagttgttaatcttggctccatactgtaccaataaatttattctctctatgacttcatcatctgttcccgagagataatatagaggtgttttatgctgtttatcacacgcgtttggatctgcgccgtgcgtcagcagcatcgcgactattctattattattaattttagaagctatatgcaatggataatttccatcatcatccgtctcatttggagagtatcctctatgaagaagttcttcgacaaatcgttcatctagtcctttaattccacaatacgcatgtagaatgtgataattatttccagaaggttcgatagcttgtagcatattcctaaatacatctaaatttttactattatatttggcataaagagatagataatactcggccgacataatgttgtccattgtagtataaaaattaatatttctatttctatttctgtatatttgcaacaatttactctctataacaaatatcataacttagtttttttatgtcaagaaggcactggtttagttcatctataaatgtcacgccataactaccacgcatgccatactcagaattatgataaagatatttatccttggggtgtaggtaatggggattaatctttgttggatcagtctctaagttaacacatgtcacacatgatccatttatagttatatcacacgatgatgatttatgaattgattccggaagatcgctatcgtattttgtggttccacaattcatttccatacatgttattgtcacactaatattatgatgaactttatctagccgctgagtggtaaacaacagaacagatagtttattatctttaccaacaccctcagccgctgccacaaatctctgatccgtatccatgatggtcatgtttatttctagtccgtatccagtcaacactatgttagcatttctgtcgatatagctttcactcatatgacactcaccaataatagtagaattaatgtcgtaatttacaccaatagtgagttcggcggcaaagtaccaataccggtaatcttgtcgaggaggacatatagtattcttgtattctaccgaatacccgagagatgcgatacaaaagagcaagactaatttgtaaaccatcttactcaaaatatgtaacaatagtacgatgcaatgagtaagacaataggaaatctatcttatatacacataattattctatcaattttaccaattagttagtgtaatgttaacaaaaatgtgggagaatctaattagtttttctttacacaattgacgtacatgagtctgagttccttgtttttgctaattatttcatccaatttattattcttgacgatatcgagatcttttgtataggagtcaaacttgtattcaacatgcttttctataatcattttagctatttcggcatcatccaatagtacattttccagattagcagaatagatattaatgtcgtatttgaacagagcctgtaacatctcaatgtctttattatctatagccaatttaatgtccggaatgaagagaagggaattattggtgtttgtcgacgtcatatagtcgagcaagagaatcatcatatccacgtgtccattttttatagtgatgtgaatacaactaaggagaatagccagatcaaaagtagatggtatctctgaaagaaagtaggaaacaatacttacatcattaagcatgacggcatgataaaatgaagttttccatccagttttcccatagaacatcagtctccaatttttcttaacaaacagttttaccgtttgcatgttaccactatcaaccgcataatacaatgcggtgtttcccttgtcatcaaattgtgaatcatccagtccactgaatagcaaaatctttactattttggtatcttccaatgtggctgcctgatgtaatggaaattcattctctagaagatttttcaatgctccagcgttcaacaacgtacatactagacgcacgttattatcagctattgcataatacaaggcactatgtccatggacatccgccttaaatgtatctttactagagagaaagcttttcagctgcttagacttccaagtattaattcgtgacagatccatgtctgaaacgagacgctaattagtgtatattttttcattttttataattttgtcatattgcaccagaattaataatatctttaatagatctgattagtagatacatggctatcgcaaaacaacatatacacatttaataaaaataatatttattaagaaaattcagatttcacgtacccatcaatataaataaaataatgattccttacaccgtacccatattaaggagattccaccttacccataaacaatataaatccagtaatatcatgtctgatgatgaacacaaatggtgtattaaattccagtttttcaggagatgatctcgccgtagctaccataatagtagatgcctctgctacagttccttgttcgtcgacatctatctttgcattctgaaacattttataaatatataatgggtccctagtcatatgtttaaacgacgcattatctggattaaacatactaggagccatcatttcggctatcgacttaatatccctcttattttcgatagaaaatttagggagtttaagattgtacactttattccctaattgagacgaccaatagtctaattttgcagccgtgatagaatctgtgaaatgggtcatattatcacctattgccaggtacatactaatattagcatccttatacggaaggcgtaccatgtcatattctttgtcatcgattgtgattgtatttccttgcaatttagtaactacgttcatcatgggaaccgttttcgtaccgtacttattagtaaaactagcattgcgtgttttagtgatatcaaacggatattgccatatacctttaaaatatatagtattaatgattgcccatagagtattattgtcgagcatattagaatctactacattagacataccggatctacgttctactatagaattaattttattaaccgcatctcgtctaaagtttaatctatataggccgaatctatgatattgttgataatacgacggtttaatgcacacagtattatctacgaaactttgataagttagatcagtgtacgtatatttagatgttttcagcttagctaatcctgatattaattctgtaaatgctggacccagatctctttttctcaaatccatagtcttcaataattctattctagtattacctgatgcaggcaatagcgacataaacatagaaaacgaataaccaaacggtgagaagacaatattatcatcttgaatatttttatacgctactataccggcattggtaaatccttgtagacgataggcggacgctgaacacgctaacgatagtatcaataacgcaatcatgattttatggtattaataattaaccttatttttatgttcggtataaaaaaattattgatgtctacacatccttttgtaattgacatctatatatccttttgtataatcaactctaatcactttaacttttacagttttccctaccagtttatccctatattcaacatatctatccatatgcatcttaacactctctgccaagatagcttcagagtgaggatagtcaaaaagataaatatatagagcataatcattctcgtatactctgccctttattacatcacccgcattgggcaacgaataacaaaatgcaagcatcttgttaacgggctcgtaaattgggataaaaattatgtttttattgtcttatatctattttattcaagagaatattcaggaatttctttttccggttgtatctcgtcgcagtatatatcatttgtacattgtttcatattttttaatagtttacaccttttagtaggactagtatcgtacaattcatagctgtattttgaattccaatcacgcataaaaatatcttccaattgttgacgaagacctaatccatcatccggtgtaatattaatagatgctccacatgtatccgtaaagtaatttcctgtccaatttgaggtacctatataggccgttttatcggttaccatatatttggcatggtttaccctagaatacggaatgggaggatcagcatctggtacaataaatagctttacttctatatttatgtttttagattttagcatagcgatagatcttaaaaagtttctcatgataaacgaagatcgttgccagcaactaatcaatagcttaacggatacttgtctgtctatagcggatcttcttaattcatcttctatataaggccaaaacaaaattttacccgccttcgaataaataatagggataaagttcataacagatacataaacgaatttactcgcatttctaatacatgacaataaagcggttaaatcattggttctttccatagtacatagttgttgcggtgcagaagcaataaatacagagtgtggaacgccgcttacgttaatactaagaggatgatctgtattataatacgacggataaaagtttttccaattatatggtagattgttaactccaagataccagtatacctcaaaaatttgagtgagatccgctgccaagttcctattattgaagatcgcaatacccaattccttgacctgagttagtgatctccaatccatgttagcgcttcctaaataaatatgtgtattatcagatatccaaaattttgtatgaagaactcctcctaggatatttgtaatatctatgtatcgtacttcaactccggccatttgtagtctttcaacatcctttaatggtttgttagatttattaacggctactctaactcgtactcctcttttgggtaattgtacaatctcgtttaatattatcgtgccgaaattcgtacccacttcatccgataaactccaataaaaagatgatatatctagtgtttttgtggtattggatagaatttccctccacatgttaaatgtagacaaatatactttatcaaattgcatacctataggaatagtttctgtaatcactgcgattgtattatccggattcattttatttgttaaaagaataatcctatatcacttcactctattaaaaatccaagtttctatttctttcatgactgattttttaacttcatccgtttccttatgaagatgatgtttggcaccttcataaatttttatttctctattacaatttgcatgttgcatgaaataatatgcacctaaaacatcgctaatcttattgtttgttccctggagtatgagagtcggggggtgttaatcttggaaattatttttctaaccttgttggtagccttcaagacctgactagcaaatccagccttaattttttcatgattgactaatgggtcgtattggtatttataaactttatccatatctctagatactgattctggacatagctttccgactggcgcatttggtgtgatggttcccataagtttggcagctagcagattcagtcttgaaacagcatctgcattaactagaggagacattagaatcattgctgtaaacaagtttggattatcgtaagaggctagctcccatggaatgacccaataagtagatttaatagttaccacgtgctgtaccaaagtcatcaatcatcattttttcaccattacttcttccatgtccaatatgatcatgtgagaatactaaaattcctaacgatgatatgttttcagctagttcgtcataacgtccagaatgtttaccagctccatgacttatgaatactaatgccttaggatatgtaataggtttccaatatttacaatatatgtaatcattgtccagattgaacatacagtttgcactcatgattcacgttatataactatcaatattaacagttcgtttgatgatcatattatttttatgttttattgataattgtaaaaacatacaattaaatcaatatagaggaaggagacggctactgtcttttgtaagatagtcatggcgactaaattagattatgaggatgctgttttttactttgtggatgatgataaaatatgtagtcgcgactccatcatcgatctaatagatgaatatattacgtggagaaatcatgttatagtgtttaacaaagatattaccagttgtggaagactgtacaaggaattgatgaagttcgatgatgtcgctatacggtactatggtattgataaaattaatgagattgtcgaagctatgagcgaaggagaccactacatcaattttacaaaagtccatgatcaggaaagtttattcgctaccataggaatatgtgctaaaatcactgaacattggggatacaaaaagatttcagaatctagattccaatcattgggaaacattacagatttgatgaccgacgataatataaacatcttgatactttttctagaaaaaaaattgaattgatgatataggggtcttcataacgcataattattacgttagcattctatatccgtgttaaaaaaaattatcctatcatgtatttgagagttttatatgtagcaaacatgatagctgtgatgccaataagctttagatattcacgcgtgctagtgttagggatggtattatctggtggtgaaatgtccgttatataatctacaaaacaatcatcgcatatagtatgcgatagtagagtaaacatttttatagtttttactggattcatacatcgtctacccaattcggttataaatgaaattgtcgccaatcttacacccaaccccttgttatccattagcatagtattaacttcgttatttatgtcataaactgtaaatgattttgtagatgccatatcatacatgatattcatgtccctattataatcattactaactttatcacaatatatgttgataatatctatatatgatctagtctttgtgggcaactgtctatacaagtcgtctaaacgttgtttactcatatagtatcgaacagccatcattacatggtcccgttccgttgatagataatcgagtatgttagtggacttgtcaaatctatataccatattttctggaagtggatatacatagtcgtgatcaacattattgctagcctcatcttctatatcctgtactataccattatctatatcatctacataatctatgatattattacacataaacatcgacaacatactattgtttattatctaagtcctgttgatccaaacccttgatctcctctatttgtactatctagagattgtacttcttccagttctggataatatatacgttgatagattagctgagctattctatctccagtatttacattaaacgtacattttccattattaataagaatgactcctatgtttcccctataatcttcgtctattacaccacctcctatatcaatgccttttagtgacagaccagacctaggagctattctaccatagcagaacttaggcatggacatactaatatctgtcttaattaactgtctttctcctggagggatagtataatcgtaagcgctatacaaatcatatccggcagcacccggcgattgcctagtaggagatttagctctgttagtttccttaacaaatctaactggtgagttaatattcatgttgaacataaaactaatattttatttcaaaattatttaccatcccatatattccatgaataagtgtgatgattgtacacttctatagtatctatatacgatccacgataaaatcctcctatcaatagcagtttattatccactatgatcaattctggattatccctcggataaataggatcatctatcagagtccatgtattgctggattcacaataaaattccgcatttctaccaaccaagaataaccttctaccgaacactaacgcgcatgatttataatgaggataataagtggatggtccaaactgccactgatcatgattgggtagcaaatattctgtagttgtatcagtttcagaatgtcctcccattacgtatataacattgtttatggatgccactgctggattacatctaggtttcagaagactcggcatattaacccaagcagcatccccgtggaaccaacgctcaacagatgtgggatttggtagacctcctactacgtataatttattgttagcgggtatcccgctagcatacagtctggggctattcatcggaggaattggaatccaattgtttgatatataatttacagctatagcattgttatgtatttcattgttcatccatccaccgatgagatatactacttctccaacatgagtacttgtacacatatggaatatatctataatttgatccatgttcataggatactctatgaatggatacttgtatgatttgcgtggttgtttatcacaatgaaatattttggtacagtctagtatccattttacattatttatacctctgggagaaagataatttgacctgattacatttttgataaggagtagcagatttcctaatttatttcttcgcctcatataccacttaatgacaaaatcaactacataatcctcatctggaacatttagttcatcgctttctagaataagtttcatagatagataatcaaaattgtctatgatgtcatcttccagttccaaaaagtgtttggcaataaagtttttagtatgacataagagattggatagtccgtattctatacccatcatgtaacactcgacacaatattcctttctaaaatctcgtaagataaagtttatacaagtgtagatgataaattctacagaggttaatatagaagcacgtaataaattgacgacgttatgactatctatatatacctttccagtatatgagtaaataactatagaagttaaactgtgaatgtcaaggtctagacaaacccttgtaactggatctttatttttcgtgtatttttgacgtaaatgtgtgcgaaagtaaggagataactttttcaatatcgtagaattgactattatattgcctcctatggcatcaataattgttttgaatttcttagtcatagacaatgctaatatattcttacagtacacagtattgacaaatatcggcatttatgtttctttaaaagtcaacatctagagaaaaatgattatctttttgagacataactcccattttttggtattcacccacacgtttttcgaaaaaattagtttttccttccaatgatatattttccatgaaatcaaacggattggtaacattataaatttttttaaatcccaattcagaaatcaatctatccgcgacgaattctatatatgttttcatcatttcacaattcattcctataagtttaactggaagagccgcagtaagaaattcttgttcaatggatactgcatctgttataatagatctaacggtttcttcactcggtggatgcaataaatgtttaaacatcaaacatgcgaaatcgcagtgcagaccctcgtctctactaattagttcgttggaaaacgtgagtccgggcattaggccacgctttttaagccaaaatatggaagcgaatgatccagaaaagaaaattccttctactgcagcaaaggcaataagtctctctccataaccggcgctgtcatgtatccacttttgagcccaatcggccttcttttttacacaaggcatcgtttctatggcattaaagagatagtttttttcattactatctttaacataagtatcgatcaaaagactatacatttccgaatgaatgttttcaatggccatctgaaatccgtagaaacatctagcctcggtaatctgtacttctgtacaaaatcgttccgccaaattttcattcactattccgtcactggctgcaaaaaacgccaatacatgttttataaaatatttttcgtctggtgttagtttattccaatcattgatatctttagatatatctacttcttccactgtccaaaatgatgcctctgcctttttatacatgttccagatgtcatgatattggattgggaaaataacaaatctatttggatttggtgcaaggatgggttccataactaaattaacaataacaataaattttttttcagttatctatatgcctgtacttggattttttgtacatcgatatcgccgcaatcactacaataattacaagtattattgatagcattgttattagtactatcataattaaattatctacattcatgggtgctgaataatcgttattatcatcattatcattttgtaattgtgacatcatactagataaatcgtttgcgagattgttgtgggaagcgggcatggaggatgcattatcattattatttaacgccttccatttggattcacaaatgttacgcacattcaacattttatggaaactataattttgtgaaaacaaataacaagaaaactcgtcatcgttcaaatttttaacgatagtaaaccgattaaacgtcgagctaatttctaacgctagcgactctgttggatatgggtttccagatatatatcttttcagttcccctacgtatctataatcatctgtaggaaatggaagatatttccatttatctactgttcctaatatcatatgtggtggtgtagtagaaccattaagcgcgaaagatgttatttcgcatcgtattttaacttcgcaataatttctggttagataacgcactctaccagtcaagtcaatgatattagcctttacagatatattcatagtagtcgtaacgatgactccatcttttagatgcgatactcctttgtatgtaccagaatcttcgtacctcaaactcgatatatttaaacaagttaatgagatattaacgcgttttatgaatgatgatatataaccagaagttttatcctcggtggctagcgctataaccttatcattataataccaactagtgtgattaatatgtgacacgtcagtgtgggtacaaatatgtacattatcgtctacgtcgtattcgatacatccgcatacagccaacaaatataaaatgacaaatactctaacgccgttcgtacccatcttgatgcggtttaataaatgttttgatttcaatttattgtaaaaaaagattcggttttatactgttcgatattctcattgcttatattttcatctatcatctccacacagtcaaatccgtggttagcatgcacctcatcaaccggtaaaagactatcggactcttctatcattataactctagaatatttaatttggtcattattaatcaagtcaattatcttatttttaacaaacgtgagtattttactcattttttataaaaacttttagaaatatacagactctatcgtgtgtctatatcttctttttatatccaatgtatttatgtctgatttttcttcatttatcatatataatggtccaaattctacacgtgcttcggattcatccagatcattaaggttcttataattgtaacatccttctcttccctcttctacatcttccttcttattcttattcttagcgtcacagaatctaccacagcaggatcccatgacgagcgtcatattaaactaatccattttcaattataatatatgattagtaatgaccattaaaataaaaaatattcttcataaccggcaagaaagtgaaaagttcacattgaaactatgtcagtagtatacatcatgaaatgatgatatatatatactctattttggtggaggattatatgatataattcgtggataatcatttttaagacacatttctttattcgtaaatcttttcacgttaaatgagtgtccatattttgcaatttcttcatatgatggcggtgtacgtggacgaggctgctcctgttcttgttgtggtcgccgactgtcgtgtctgcgtttagatccctccattatcgcgattgcgtagatggagtactattttataccttgtaattaaatttttttattaattaaacgtataaaaacgttccgtatctgtatttaagagccagatttcgtctaatagaacaaatagctacagtaaaaataactagaataattgctacacccactagaaaccacggatcgtaatacggcaatcggttttcgataataggtggaacgtatattttatttaaggacttaacaattgtctgtaaaccacaatttgcttccgcggatcctgtattaactatctgtaaaagcatatgttgaccgggcggagccgaacattctccgatatctaatttctgtatatctataatattattaacctccgcatacgcattacagttcttttctagcttggataccgcactaggtacatcgtctagatctattcctatttcctcagcgatagctcttctatccttttccggaagcaatgaaatcacttcaataaatgattcaaccatgagtgtgaaactaagtcgagaattactcatgcatttgttagttattcggagcgcgcaatttttaaactgtcctataacctctcctatatgaatagcacaagtgacattagtagggatagaatgttgagctaatttttgtaaataactatctataaaaagattatacaaagttttaaactctttagtttccgccatttatccagtctgagaaaatgtctctcataataaatttttccaagaaactaattgggtgaagaatggaaacctttaatctatatttatcacagtctgttttggtacacatgatgaattcttccaatgccgtactaaattcgatatctttttcgatttctggatatgtttttaataaagtatgaacaaagaaatggaaatcgtaataccagttatgtttaactttgaaattgttttttattttcttgttaatgattccagccacttgggaaaagtcaaagtcgtttaatgccgatttaatacgttcattaaaaacaaactttttatcctttagatgaattattattggttcattggaatcaaaaagtaagatattatcgggtttaagatctgcgtgtaaaaagttgtcgcaacagggtagttcgtagattttaatgtataacagagccatctgtaaaaagataaactttatgtattgtaccaaagatttaaatcctaatttgatagctaactcggtatctactttatctgccgaatacagtgctaggggaaaaattataatgtttcctctttcatattcgtagttagttctcttttcatgttcgaaaaagtgaaacatgcggttaaaatagtttataacattaatattactgttaataactgccggataaaagtgggatagtaatttcacgaatttgatactgtcctttctctcgttaaacgcctttaaaaaaactttagaagaatatctcaatgagagttcctgaccatccatagtttgtatcaataatagcaacatatgaagaacacgtttatacagagtatgtaaaaatgttaatttatagtttaatcccatggcccacgcacacacgattaattttttttcatctccctttagattgttgtatagaaatttgggtactgtgaactccgccgtagtttccatgggactatataattttgtggcctcgaatacaaattttactacatagttatctatcttaaagactataccatatcctcctgtagatatgtgataaaaatcgtcgtttataggataaaatcgtttatccttttgttggaaaaaggatgaattaatgtaatcattctcttctatctttagtagtgtttccttattaaaattcttaaaataatttaacaatctaactgacggagcccaattttggtgtaaatctaattgggacattatattgttaaaatacaaacagtctcctaatataacagtatctgataatctatggggagacatccattgatattcaggggatgaatcattggcaacacccatttattgtacaaaaagccccaatttacaaacgaaagtccaggtttgatagagacaaacaattaactattttgtctctgtttttaacacctccacagtttttaatttctttagtaatgaaattattcacaatatcagtatcttctttatctaccagagattttactaacttgataaccttggctgtctcattcaatagggtagtaatatttgtatgtgtgatattgatatctttttgaattgtttcttttagaagtgattctttgatggtgccagcatacgaattacaataatgcagaaactcggttaacatgcaggaattatagtaagccaattccaattgttgcctgtgttgtattagagtgtcaatatgagcaatggtgtccttgcgtttctctgatagaatgcgagcagcgattttggcgttatcatttgacgatatttctggaatgacgaatcctgtttctactaactttttggtaggacaaagtgaaacaatcaagaagatagcttctcctcctatttgtggaagaaattgaactcctctagatgatctactgacgatagtatctccttgacagatattggaccgaattacagaagtacctggaatgtaaagccctgaaaccccctcattttttaagcagattgttgccgtaaatcctgcactatgcccaagatagagagctcctttggtgaatccatctctatgtttcagtttaaccaagaaacagtcagctggtctaaaatttccatctctatctaatacagcatctaacttgatgtcaggaactatgaccggtttaatgttatatgtaacattgagtaaatccttaagttcataatcatcactgtcatcagttatgtacgatccaaacaatgtttctaccggcatagtggatacgaagatgctatccatcagaatgtttccctgattagtattttctatatagctattcttctttaaacgattttccaaatcagtaactatgttcatttttttaggagtaggacgcctagccagtatggaagaggattttctagatcctctcttcaacatctttgatctcgatggaatgcaaaaccccatagtgaaacaaccaacgataaaaataatattgtttttcactttttataattttaccatctgactcatggattcattaatatctttataagagctactaacgtataattctttataactgaactgagatatatacaccggatctatggtttccataattgagtaaatgaatgctcggcaataactaatggcaaatgtatagaacaacgaaattatactagagttgttaaagttaatattttctatgagctgttccaataaattatttgttgtgactgcgttcaagtcataaatcatcttgatactatccagtaaaccgtttttaagttctggaatattatcatcccattgtaaagcccctaattcgactatcgaatatcctgctctgatagcagtttcaatatcgacggacgtcaatactgtaataaaggtggtagtattgtcatcatcgtgataaactacgggaatatggtcgttagtaggtacggtaactttacacaacgcgatatataactttccttttgtaccatttttaacgtagttgggacgtcctgcagggtattgttttgaagaaatgatatcgagaacagatttgatacgatatttgttggattcctgattattcactataatataatctagacagatagatgattcgataaatagagaaggtatatcgttggtaggataatacatccccattccagtattctcggatactctattgatgacactagttaagaacatgtcttctattctagaaaacgaaaacatcctacatggactcattaaaacttctaacgctcctgattgtgtctcgaatgcctcgtacaaggatttcaaggatgccatagattctttgaccaacgatttagaattgcgtttagcatctgatttttttattaaatcgaatggtcggctctctggtttgctaccccaatgataacaatagtcttgtaaagataaaccgcaagaaaatttatacgcatccatccaaataaccctagcaccatcggatgatattaatgtattattatagattttccatccacaattattgggccagtatactgttagcaacggtatatcgaatagattactcatgtaacctactagaatgatagttcgtgtactagtcataatatctttaatccaatctaaaaaatttaaaattagattttttacactgttaaagttaacaaaagtattacccgggtacgtggatatcatatatggcattggtccattatcagtaatagctccataaactgatacggcgatggtttttatatgtgtttgatctaacgaggaagaaattcgcgcccacaattcatctctagatatgtatttaatatcaaacggtaacacatcaatttcgggacgcgtatatgtttctaaatttttaatccaaatataatgatgacctatatgccctattatcatactgtcaactatagtacacctagggaacttacgatacatctgtttcctataatcgttaaattttacaaatctataacatgctaaaccttttgacgacagccattcattaatttctgatatggaatctgtattctcgataccgtatcgttctaaagccagtgctatatctccctgttcgtgggaacgctttcgtataatatcgatcaacggataatctgaagtttttggagaataatatgactcatgatctatttcgtccataaacaatctagacataggaattggaggcgatgatcttaattttgtgcaatgagtcgtcaatcctataacttctaatcttgtaatattcatcatcgacataatactatctatgttatcatcgtatattagtataccatgaccttcttcatttcgtgccaaaatgatatacagtcttaaatagttacgcaatatctcaatagtttcataattgttagctgttttcatcaaggtttgtatcctgtttaacatgatggcgttctataacgtctctattttctatttttaattttttaaatttttaacgatttactgtggctagatacccaatctctctcaaatatttttttagcctcgcttacaagctgtttatctatactattaaaactgacgaatccgtgattttggtaatgggttccgtcgaaatttgccgaagtgatatgaacatattcgtcgtcgactatcaacaattttgtattattctgaatagtgaaaaccttcacagatagatcattttgaacacacaacgcatctagacttttggcggttgccatagaatatacgtcgttcttatcccaattaccaactagaagtctgatcttaactcctctattaatggctgcttctataatggagttgtaaatgtcgggccaatagtagctattaccgtcgacacgtgtagtgggaactatggccaaatgttcaatatctatactagtcttagctgacctgagtttatcaataactacatcggtatctagatctctagaatatcccaataggtgttccggagaatcagtaaagaacactccacctataggattcttaatatgatacgcagtgctaactggcaaacaacaagccgcagagcataaattcaaccatgaattttttgcgctattaaaggctttaaaagtatcaaatcttctacgaagatctgtggccagcgggggataatcagaatatacacctaacgttttaatcgtatgtatagatcctccagtaaatgacgcgtttcctacataacatctttcatcatctgacacccaaaaacaaccgagtagtagtcccacattattttttttatctatattaacggttataaaatttatatccgggcagtgactttgtagctctcccagatttcttttccctcgttcatctagcaaaactattattttaatccctttttcagatgcctcttttagtttatcaaaaataagcgctcccctagtcgtactcagaggattacaacaaaaagatgctatgtatatatatttcttagctagagtgataatttcgttaaaacattcaaatgttgttaaatgatcggatctaaaatccatattttctggtagtgtttctaccagcctacattttgctcccgcaggtaccgatgcaaatggccacatttagttaacataaaaacttatacatcctgttctatcaacgattctagaatatcatcggctatatcgctaaaattttcatcaaagtcgacatcacaacctaactcagtcaatatattaagaagttccatgatgtcatcttcgtctatttctatatccgtatccattgtagattgttgaccgattatcgagtttaaatcattactaatactcaatccttcagaatacaatctgtgtttcattgtaaatttataggcggtgtatttaagttggtagattttcaattatgtattaatatagcaacagtagttcttgctcctccttgattctagcatcctcttcattattttcttctacgtacataaacatgtccaatacgttagacaacacaccgacgatggcggccgcaggatcctcaagagccagactcacatttcagctgcttttccaggccacagatgatcagttccaggccaaaaaggaatgcaggctcagccccttggtggtcaaacaactcaatagcttgccgcagcagtggtggcatggagtcagtggtgggggtctccctctcctccttggcaacttggtgctcctggtcctccagcacacagcccaaggtgaagtggcccacagcagagagggcatacaaggcattttccagggagaagccttgttggcacaggaatgccagctggttctccagggtctcatactgcttctctgtaggcctggtgcccaagtgaactttggcaccatcccggtgggagagcaaggcacatctgaagctcttggcattgttcctcaggaagtcctgccaggactccccttccagagggcagaagtgggtgtggtgcctgtccaacatctcaatggccagggcatcaagcagagccctcttgttcttcacatgccagtacagggtaggctgctccacacccagcttctgggccagcttcctggtggtcaagccctcaatgccaacttcattcaggagctccaaggcagagttgatgactttgctcttgtccagtctggacatctcgagttatgatctacttccttaccgtgcaataaattagaatatattttctacttttacgagaaattaattattgtatttattatttatgggtgaaaaacttactataaaaagcgggtgggtttggaattagtgaaagcttacagacacgaatatgactaaaccgatgaccatttaaaaacccctctctagctttcacttaaactgtatcgatcattcttttagcacatgtataatataaaaacattattctatttcgaatttaggcttccaaaaatttttcatccgtaaaccgataataatatatatagacttgttaatagtcggaataaatagattaatgcttaaactatcatcatctccacgattagagatacaatatttacattctttttgctgtttcgaaactttatcaatacacgttaatacaaacccaggaaggagatattgaaactgaggctgttgaaaatgaaacggtgaatacaataattcagataatgtaaaatcatgattccgtattctgatgatattagaactgctaatggatgtcgatggtatgtatctaggagtatctattttaacaaagcatcgatttgctaatatacaattatccttttgattaattgttattttattcatattcttaaaaggtttcatatttatcaattcttctacattaaaaatttccatttttaatttatgtagccccgcaatactcctcattacgtttcattttttgtctataatatccattttgttcatctcggtacatagattatccaattgagaagcgcatttagtagttttgtacattttaagtttattgacgaatcgtcgaaaactagttatagttaacattttattatttgataccctgatattaatacccctgccgttactattatttataactgatgtaatccacgtaacattggaattaactatcgatagtaatgcatcgacgcttccaaaattgtctattataaactcaccgataatttttttattgcatgttttcatattcattaggattatcaaatctttaatcttattacgattgtatgcgttgatattacaagacgtcattctaaaagacggaggatctccatcaaatgccagacaatcacgtacaaagtacatggaaataggttttgttctattgcgcatcatagatttatatagaacacccgtagaaatactaatttgttttactctataaaatactaatgcatctatttcatcgttttgtataacgtctttccaagtgtcaaattccaaatttttttcattgatagtaccaaattcttctatctctttaactacttgcatagataggtaattacagtgatgcctacatgccgttttttgaaactgaatagatgcgtctagaagcgatgctacgctagtcacaatcaccactttcatatttagaatatatatatgtaaaaatatagtagaatttcattttgtttttttctatgctataaatgaattctcattttgcatctgctcatactccgttttatattaataccaaagaaggaagatatctggttctaaaagccgttaaagtatgcgatgttagaactgtagaatgcgaaggaagtaaagcttcctgcgtactcaaagtagataaaccctcatcgcccgcgtgtgagagaagaccttcgtccccgtccagatgcgagagaatgaataaccctggaaaacaagttccgtttatgaggacggacatgctacaaaatatgttcgcggctaatcgcgataatgtagcttctagacttttgtcctaaaatactattatatccttttcgatattaataaatccgtgtcgtccaggttttttatctctttcagtatgtgaatagataggtattttatctctattcatcatcgaatttaagagatccgataaacattgtttgtattctccagatgtcagcatctgatacaacaatatatgtgcacataaacctctggcacttatttcatgtaccttccccttatcactaaggagaatagtatttgagaaatatgtatacatgatattatcatgaattagatatacagaatttgtaacactctcgaaatcacacgatgtgtcggcgttaagatctaatatatcactcgataacacattttcatctagatacactagacattttttaaagctaaaatagtctttagtagtaacagtaactatgcgattattttcatcgatgatacatttcatcggcatattattacgcttaccatcaaagactataccatgtgtatatctaacgtattctagcatggttgccatacgcgcattaaacttttcaggatctttggatagatcttccaatctatctatttgagaaaacatttttatcatgttcaatagttgaaacgtcggatccactatatagatattatctataaagattttaggaactacgttcatggtatcctggcgaatattaaaactatcaatgatatgattatcgttttcatcttttatcaccatatagtttctaagatatgggattttacttaatataatattatttcccgtgataaattttattagaaaggccaaatctataagaaaagtcctagaattagtctgaagaatatctatatcgccgtatagtatatttggattaattagatatagagaatatgatccgtaacatatacaacttttattatggcgtctaagatattcttccatcaacttattaacatttttgactagggaagatacattatgacgtcccattacttttgccttgtctattactgcgacgttcatagaatttagcatatctcttgccaattcttccattgatgttacattataagaaattttagatgaaattacatttggagctttaatagtaagaactcctaatatgtccgtgtatgtggtcactaatacagattgtagttctataatcgtaaataatttacctatattatatgtttgagtctgtttagaaaagtagctaagtatacgatcttttatttctgatgcagatgtattaacatcggaaaaaaatctttttttattcttttttactaaagatacaaatatgtctttgttaaaaacagttattttctgaatatttctagcttgtaattttaacatatgatattcgttcacactaggtactctgcctaaataggtttctataatctttaatgtaatattaggaaaagtattctgatcaggattcctattcattttgaggatttaaaactctgattattgtctaatatggtctctacgcaaactttttcacagagcgatagagtttttgataactcgtttttcttaagaaatataaaactactgtctccagagctcgctctatcttttattttatctaattcgatacaaactcctgatactggttcagaaagtaattcattaattttcagtcctttatagaagatatttaatatagataatacaaaatcttcagtttttgatatcgatctgattgatcctagaactagatatattaataacgtgctcattaggcagtttatggcagcttgataattagatatagtatattccagttcatatttattagataccgcattgcccagattttgatattctatgaattcctctgaaaataaatccaaaataactagacattctattttttgtggattagtgtactctcttccctctatcatgttcactactggtgtccacgatgataaatatctagagggaatataatatagtccataggatgccaatctagcaatgtcgaataactgtaattttattcttcgctcttcattatgaattgattcttgaggtataaacctaacacaaattatattattagacttttcgtatgtaatgtctttcatgttataagtttttaatcctggaatagaatctattttaatgaggcttttaaacgcagagttctccaacgagtcaaagcataatactctgttgtttttcttatatacgatgttacgattttcttctttgaatggaataggtttttgaattagtttataattacaacataatagataaggaagtgtgcaaatagtacgcggaaaaaacataatagctcccctgttttcatccatggttttaagtaaatgatcactggcttctttagtcaatggatattcgaacattaaccgtttcatcatcattggacagaatccatatttcttaatgtaaagagtgatcaaatcattgtgtttattgtaccatcttgttgtaaatgtgtattcggttatcggatctgctcctttttctattaaagtatcgatgtcaatctcgtctaagaattcaactatatcgacatatttcatttgtatacacataaccattactaacgtagaatgtataggaagagatgtaacgggaacagggtttgttgattcgcaaactattctaatacataattcttctgttaatacgtcttgcacgtaatctattatagatgccaagatatctatataattattttgtaagatgatgttaactatgtgatctatataagtagtgtaataattcatgtattttgatatatgttccaactctgtctttgtgatgtctagtttcgtaatatctatagcatcctcaaaaaatatattcgcatatattcccaagtcttcagttctatcttctaaaaaatcttcaacgtatggaatataataatctattttacctcttctgatatcattaatgatatagtttttgacactatcttctgtcaattgattcttattcactatatctaagaaacggatagcgtccctaggacgaactactgccattaatatctctattatagcttctggacataattcatctattataccagaattaatgggaactattccgtatctatctaacatagttttaagaaagtcagaatctaagacttgatgttcatatattggttcatacatgaaatgatctctattgatgatagtgactatttcattctctgaaaattggtaactcattctatatatgctttccttgttgatgaaggatagaatatactcaatagaatttgtaccaacaaactgttctcttatgaatcgtatatcatcatctgaaataatcatgtaaggcatacatttaacaattagagacttgtctcctgttatcaatatactattcttgtgataatttatgtgtgaggcaaatttgtccacgttctttaattttgttatagtagatatcaaatccaatggagctacagttcttggcttaaacagatatagtttttctggaacaaattctacaacattattataaaggactttgggtagataagtgggatgaaatcctattttaattaatgcgatagccttgtcctcgtgcagatatccaaacgcttttgtgatagtatggcattcattgtctagaaacgctctacgaatatctgtgacagatatcatctttagagaatatactagtcgcgttaatagtactacaatttgtattttttaatctatctcaataaaaaaattaatatgtatgattcaatgtataactaaactactaactgttattgataactagaatcagaatctaatgatgacgtaaccaagaagtttatctactgccaatttagctgcattatttttagcatctcgtttagattttccatcggccttatcgaatactcttccgtcgatgtctacacaggcataaaatgtaggagagttactaggcccaactgattcaatacgaaaagaccaatctctcctagtaatttggcagtactcattaataacggtgacagggttagcatctttccaatcaataatttttttagccggaataacatcatcaaaagacttatgatcctctctcattgatttttcgcgggatacatcatctattatgacgtcagccatagcatcagcatccggcttatccgcctccgttgtcataaaccaacgaggaggaatatcgtcggagctgtacaccatagcactacgttgaagatcgtacagagctttattaacttctcgcttctccatattaagttgtctagttagttgtgcagcagtagctccttcgattccaatgtttttaatagccgcacacacaatctctgcgtcagaacgctcgtcaatatagatcttagacatttttagagagaactaacgcaaccagcaataaaactgaacctactttatcatttttttattcatcatcctctggtggttcgtcgttcctatcaaatgtagctctgattaacccgtcatctataggtgatgctggttctggagattctggaggagatggattattatctggaagaatctctgttatttccttgttttcatgtatcgattgcgttgtaacattaagattgcgaaatgctctaaatttgggaggcttaaagtgttgtttgcaatctctacacgcgtgtctaactagtggaggttcgtcagctgctctagtttgaatcatcatcggcgtagtattcctacttttacagttaggacacggtgtattgtatttctcgtcgagaacgttaaaataatcgttgtaactcacatcctttattttatctatattgtattctactcctttcttaatgcattttataccgaataagagatagcgaaggaattctttttcggtgccgctagtacccttaatcatatcacatagtgttttatattccaaatttgtggcaatagacggtttatttctatacgatagtttgtttctggaatcctttgagtattctataccaatattattctttgattcgaatttagtttcttcgatattagattttgtattacctatattcttgatgtagtactttgatgatttttccatggcccattctattaagtcttccaagttggcatcatccacatattgtgatagtaattctcggatatcagtagcggctaccgccattgatgtttgttcattggatgagtaactactaatgtatacattttccatttataacacttatgtattaactttgttcatttatattttttcattattatgttgatattaacaaaagtgaatatatatatgttaataattgtattgtggttatacggctacaattttataatgagtgaaagtcagtgtccgatgatcaatgacgatagctttactctgaaaagaaagtatcaaatcgatagtgcggagtcaacaataaaaatggataagaagaggataaagtttcagaatagagccaaaatggtaaaagaaataaatcagacaataagagcagcacaaactcattacgagacattgaaactaggatacataaaatttaagagaatgattatgactactactctagaagatatagcaccatctattccaaataatcagaaaacttataaactattctcggacatttcagccatcggcaaagcatcacagaatccgagtaagatggtatatgctctgctgctttacatgtttcccaatttgtttggagatgatcatagattcattcgttatagaatgcatccaatgagtaaaatcaaacacaagatcttctctcctttcaaacttaatcttattagaatattagtggaagaaagattctataataatgaatgcagatctaataaatggagaataattggaacacaagttgataaaatgttgatagctgaatctgataaatatacaatagatgcaaggtataacctaaaacccatgtatagaatcaagggagaatctgaagaagataccctctttatcaaacagatggtagaacaatgtgtgacatcccaggaattggtggaaaaagtgttgaagatactgtttagagatttgttcaagagtggagaatacaaagcgtacagatacgatgatgatgtagaaaatggatttattggattggatacactaaaattaaacattgttcatgatatagttgaaccatgtatgcctgttcgtaggccagtggctaagatactgtgtaaagaaatggtaaataaatactttgagaatccgctacatattattggtaaaaatcttcaagagtgcattgactttgttagtgaataggcatttcatctttctccaatactaattcaaattgttaaattaataatggatagtataaatagttattagttataagatagtaaaaataattattagaataagagtgtagtatcatagataactctcttctataaaaatggattttattcgtagaaagtatcttatatacacagtagaaaataatatagattttttaaaggatgatacattaagtaaagtaaacaattttaccctcaatcatgtactagctctcaagtatctagttagcaattttcctcaacacgttattactaaggatgtattagctaataccaatttttttgttttcatacatatggtacgatgttgtaaagtgtacgaagcggttttacgacacgcatttgatgcacccacgttgtacgttaaagcattgactaagaattatttatcgtttagtaacgcaatacaatcgtacaaggaaaccgtgcataaactaacacaagatgaaaaatttttagaggttgccgaatacatggacgaattaggagaacttataggcgtaaattatgacttagttcttaatccattatttcacggaggggaacccatcaaagatatggaaatcatttttttaaaactgtttaagaaaacagacttcaaagttgttaaaaaattaagtgttataagattacttatttgggcatacctaagcaagaaagatacaggcatagagtttgcggataatgatagacaaaatatatacactctatttcaacaaactggtagaatcgtccatagcaatctaacagaaacgtttagagattatatctttcccggagataagactagctattgggtgtggttaaacgaaagtatagctaatgatgcggatatcgttcttaatagacacgccattaccatgtatgataaaattcttagttatatatactctgagataaaacaaggacgcgttaataaaaacatgcttaagttagtttatatctttgagcctgaaaaagatatcagagaacttctgctagaaatcatatatgatattcctggagatatcctatctattattgatgcaaaaaacgacgattggaaaaaatattttattagtttttataaagctaattttattaacggtaatacatttattagtgatagaacgtttaacgaggacttattcagagttgttgttcaaatagatcccgaatatttcgataatgaacgaattatgtctttattctctacgagtgctgcggacattaaacgatttgatgagttagatattaataacagttatatatctaatataatttatgaggtgaacgatatcacattagatacaatggatgatatgaagaagtgtcaaatctttaacgaggatacgtcgtattatgttaaggaatacaatacatacctgtttttgcacgagtcggatcccatggtcatagagaacggaatactaaagaaactgtcatctataaaatccaagagtagacggctgaacttgtttagcaaaaacattttaaaatattatttagacggacaattggctcgtctaggtcttgtgttagatgattataaaggagacttgttagttaaaatgataaaccatcttaagtctgtggaggatgtatccgcattcgttcgattttctacagataaaaaccctagtattcttccatcgctaatcaaaactattttagctagttataatatttccatcatcgtcttatttcaaaggtttttgagagataatctatatcatgtagaagaattcttggataaaagcatccatctaaccaagacggataagaaatatatacttcaattgataagacacggtagatcatagaacagaccaaatatattattaataatttgtatatacatagatataattatcacacatttttgataaatgggaactgctgcaacaattcagactcccaccaaattaatgaataaagaaaatgcagaaatgattttggaaaaaattgttgatcatatagttatgtatattagtgacgaatcaagtgattcagaaaataatcctgaatatattgattttcgtaacagatacgaagactatagatctctcattataaaaagtgatcacgagtttgtaaagctatgtaaaaatcatgcggagaaaagttctccagaaacgcaacaaatgattatcaaacacatatacgaacaatatcttattccagtatctgaagtactattaaaacctataatgtccatgggtgacataattacatataacggatgtaaagacaatgaatggatgctagaacaactctctaccctaaactttaacaatctccgcacatggaactcatgtagcataggcaatgtaacgcgtctgttttatacattttttagttatctgatgaaagataaactaaatatataagtataatcccattctaatactttaacctgatgtattagcatcttattagaatattaacctaactaaaagacataacataaaaactcattacatagttgataaaaagcggtaggatataaatattatggctgccaccgttccgcgttttgacgacgtgtacaaaaatgcacaaagaagaattctagatcaagaaacattttttagtagaggtctaagtagaccgttaatgaaaaacacatatctatttgataattacgcgtatggatggataccagaaactgcaatttggagtagtagatacgcaaacctagatgctagtgactattatcccatttcgttgggattacttaaaaagttcgagtttctcatgtctctatataaaggtcctattcccgtatatgaagaaaaagtaaatactgaattcatagccaatggatcgttctctggtagatacgtatcatatcttcgaaagttttctgcccttccaacaaacgagtttattagttttttgttactgacttccattccaatctataatatcttgttctggtttaaaaacacacagtttgatattactaaacacacattattcagatacgtctatacagataatgccaaacacctggcgttggctaggtatatgcatcaaacaggagactataagcctttgtttagtcgtctcaaagagaattatatatttaccggtcccgttccaataagtatcaaagatatagatcaccctaatcttagtagagcaagaagtccatccgattatgagacattagctaatattagtactatattgtactttaccaagtatgatccggtattaatgtttttattgttttacgtacctgggtattcaattactacaaaaattactccagccgtagaatatctaatggataaactgaatctaacaaagagcgacgtacaactgttgtaaattattttatgcttcgtaaaatgtaggttttgaaccaaacattctttcaaagaatgagatgcataaaactttattatccaatagattgactatttcggacgtcaatcgtttaaagtaaacttcgtaaaatattctttgatcactgccgagtttaaaacttctatcgataattgtctcatatgttttaatatttacaagttttttggtccatggtacattagccggacaaatatatgcaaaataatatcgttctccaagttctatagtttctggattatttttattatattcagtaactaaatacatattagggttatctgcggatttataatttgagtgatgcattctactcaacataaataattctagaggagacgatctactatcaaattcggatcgtaaatctgtttctaaagaacggagaatatctatacatacctgattagaattcatccgtccttcagacaacatctcagacagtctggttttgtacatcttaatcatattcttatgaaacttggaaacatctcttctagtttcactagtacctttattaattctctcaggtacagattttgaattcgacgatgctgagtatttcatcgttgtatatttcttcttcgattgcataatcagattcttatataccgcctcaaactctattttaaaattattaaacaatactctattattaatcagtcgttctaactctttcgctatttctatagacttatctacatcttgactgtctatctctgtaaacacggagtcggtatctccatacacgctacgaaaacgaaatctgtaatctataggcaacgatgttttcacaatcggattaatatctctatcgtccatataaaatggattacttaatggattggcaaaccgtaacataccgttagataactctgctccatttagtaccgattctagatacaagatcattctacgtcctatggatgtgcaactcttagccgaagcgtatgagtatagagcactatttctaaatcccatcagaccatatactgagttggctactatcttgtacgtatattgcatggaatcatagatggccttttcagttgaactggtagcctgttttagcatctttttatatctggctctctctgccaaaaatgttcttaatagtctaggaatggttccttctatcgatctatcgaaaattgctatttcagagatgaggttcggtagtctaggttcacaatgaaccgtaatatatctaggaggtggatatttctgaagcaatagctgattatttatttcttcttccaatctattggtactaacaacgacaccgactaatgtttccggagatagatttccaaagatacacacattaggatacagactgttataatcaaagattaatacattattactaaacattttttgttttggagcaaataccttaccgccttcataaggaaacttttgttttgtttctgatctaactaagatagttttagtttccaacaatagctttaacagtggacccttgatgactgtactcgctctatattcgaataccatggattgaggaagcacatatgttgacgcacccgcgtctgtttttgtttctactccataatactcccacaaatactgacacaaacaagcatcatgaatacagtatctagccatatctaaagctatgtttagattataatccttatacatctgagctaaatcaacgtcatcctttccgaaagataatttatatgtatcattaggtaaagtaggacataatagtacgactttaaatccattttcccaaatatctttacgaattactttacatataatatcctcatcaacagtcacataattacctgtggttaaaacctttgcaaatgcagcggctttgcctttcgcgtctgtagtatcgtcaccgatgaacgtcatttctctaactcctctatttaatactttacccatgcaactgaacgcgttcttggatatagaatccaatttgtacgaatccaatttttcaaatttttgaatgaatgaatatagatcgaaaaatatagttccattattgttattaacgtgaaacgtagtattggccatgccgcctactcccttatgactagactgatttctctcataaatacagagatgtacagcttcctttttgtccggagatctaaagataattttctctcctgttaataactctagacgattagtaatatatctcagatcaaagttatgtccgttaaaggtaacgacgtagtcgaacgttagttccaacaattgtttagctattcgtaacaaaactatttcagaacatagaactagttctcgttcgtaatccatttccattagtgactgtatcctcaaacatcctctatcgacggcttcttgtatttcctgttccgttaacatctcttcattaatgagcgtaaacaataatcgtttaccacttaaatcgatataacagtaacttgtatgcgagattgggttaataaatacagaaggaaacttcttatcgaagtgacactctatatctagaaataagtacgatcttgggatatcgaatctaggtatttttttagcgaaacagttacgtggatcgtcacaatgataacatccattgttaatctttgtcaaatattgctcgtccaacgagtaacatccgtctggagatatcccgttagaaatataaaaccaactaatattgagaaattcatccatggtggcattttgtatgctgcgtttctttggctcttctatcaaccacatatctgcgacggagcattttctatctttaatatctagattataacttattgtctcgtcaatgtctatagttctcatctttcccaacggcctcgcattaaatggaggaggagacaatgactgatatatttcgtccgtcactacgtaataaaagtaatgaggaaatcgtataaatacggtctcgccatttcgacatctggatttcagatataaaaatctgttttcaccgtgactttcaaaccaattaatgcaccgaacatccatttatagaatttagaaatatattttcatttaaatgaatcccaaacattggggaagagccgtatggaccattatttttatagtactttcgcaagcgggtttagacggcaacatagaagcgtgtaaacgaaaactatatactatagttagcactcttccatgtcctgcatgtagacggcacgcgactatcgctatagaggacaataatgtcatgtctagcgatgatctgaattatatttattattttttcatcagattatttaacaatttggcatctgatcccaaatacgcgatcgatgtgacaaaggttaaccctttataaacttaacccattataaaacttatgattagtcacaactgaaataaccgcgtgattattttttggtataattctacacggcatggtttctgtgactatgaattcaacccccgttacattagtgaaatctttaacaaacagcaagggttcgtcaaagacataaaactcattgtttacaatcgaaatagaccccctatcacacttaaaataaaaaatatccttatcctttaccaccaaataaaattctgattggtcaatgtgaatgtattcacttaacagttccacaaatttatttattaactccgaggcacatacatcgtcggtattttttatggcaaactttactcttccagcatccgtttctaaaaaaatattaacgagttccatttatatcatccaatattattgaaatgacgttgatggacagatgatacaaataagaaggtacggtacctttgtccaccatctcctccaattcatgctctattttgtcattaactttaatgtatgaaaacagtacgccacatgcttccatgacagtgtgtaacactttggatacaaaatgtttgacattagtataattgtccaagactgtcaatctataatagatagtagctataatatattctatgatggtattgaagaagatgacaaccttggcatattgatcatttaacacagacatggtatcaacagatagcttgaatgaaagagaatcagtaattggaataagcgtcttctcgatagagtgtccgtataccaacatgtctgatattttgatgtattccattaaattatttagttttttctttttattctcgttaaacagcatttctgtcaacggaccccaacatcgttgaccgattaagttttgattgatttttccgtgtaaggcgtatctagtcagatcgtatagcctatccaataatccatcgtctgtgtgtagatcacatcgtacactttttaattctctatagaagagcgacagacatctggagcaattacagacagcaatttctttattctctacagatgtaagatacttgaagacattcctatgatgatgcagaattttggataacacggtattgatggtatctgttaccataattcctttgatggctgatagtgtcagagcacaagatttccaatctttgacaatttttagcaccattatctttgttttgatatctatatcagacagcatggtgcgtctgacaacacagggattaagacggaaagatgaaatgattctctcaacatcttcaatagataccttgctattttttctggcattatctatatgtgcgagaatatcctctagagaatcagtatcctttttgatgatagtggatctcaatgacatgggacgtttaaaccttcttattctatcaccagattgcatggtgatttgtcttctttcttttatcataatgtaatctctaaattcatcggcaaattgtctatatctaaaatcataatatgagatgtttacctctacaaatatctgttcgtccaatgttagagtatttacatcagttttgtattccaaattaaacatggcaacggatttaattttatattcctctattaagtcctcgtcgataataacagaatgtagataatcatttaatccgtcgtacatggttggaagatgcttgttgacaaaatctttaattgtcttgatgaaggtgggactatatctaacatcttgattaataaaatttataacattgtccataggatactttgtaactagttttatacacatctcttcatcggtaagtttagacagaatatcgtgaacaggtggtatattatattcatcagatatacgaagaacaatgtccaaatctatattgtttaatatattatatagatgtagcgtagctcctacaggaatatctttaactaagtcaatgatttcatcaaccgttagatctattttaaagttaatcatataggcattgatttttaaaaggtatgtagccttgactacattctcattaattaaccattccaagtcattgtgtgtaagaagattatattctatcataagcttgactacatttggtcccgataccattaaagaattcttatgatataaggaaacagattttaggtactcatctactctacaagaattttggagagccttaacgatatcagtgacgtttattatttcaggaggaaagaatctaacattgagaatatcggaattaatagcttccagatacagtgattttggcaatagtccgtgtaatccataatccagtaacacgagctggtgcttgctagacaccttttcaatgtttaatttttttgaaataagctttgataaagccttcctcgcaaattccggatacatgaacatgtcggcgacatgattaagtattgttttttcattatttttatattttctcaacaagttctcaataccccaatagatgatagaatatcacccaatgcgtccatgttgtctatttccaacaggtcgctatatccaccaatagaagtttttccaaaaaagattctaggaacagttctaccaccagtaatttgttcaaaataatcccgcaattcattttcgggtttaaattctttaatatcgacaatttcatacgctcctcttttgaaactaaacttatttagaatatccagtgcatttctacaaaaaggacatgtatacttgacaaaaattgtcactttgttattggccaacctttgttgtacaaattcctcggccattttaatatttaagtgatataaaactatctcgacttatttaactctttagtcgagatatatggacgcagatagctatatgatagccaactacagaaggcaaacgctataaaaaacataattacgacgagcatatttataaatatttttattcagcattacttgatatagtaatattaggcacagtcaaacattcaaccactctcgatacattaactctctcattttctttaacaaattctgcaatatcttcgtaaaaagattcttgaaactttttagaatatctatcgactctagatgaaatagcgttcgtcaacatactatgttttgtatacataaaggcgcccattttaacagtttctagtgacaaaatgctagcgatcctaggatcctttagaatcacatagattgacgattcgtctctcttagtaactctagtaaaataatcatacaatctagtacgcgaaataatattatccttgacttgaggagatctaaacaatctagttttgagaacatcgataagttcatcgggaatgacatacatactatctttaatagaactcttttcatccagttgaatggattcgtccttaaccaactgattaatgagatcttctattttatcattttccagatgatatgtatgtccattaaagttaaattgtgtagcgcttctttttagtctagcagccaatactttaacatcactaatatcgatatacaaaggagatgatttatctatggcattaagaattcgtttttcgacatccgtcaaaaccaattcctttttgcctgtatcatccagttttccatcctttgtaaagaaattattttctactagactattaataagactgataaggattcctccataattgcacaatccaaactttttaacaaaactagactttacgagatctacaggaatgcgtacttcaggttttttagcttgtgattttttcttttgcggacattttctagtaaccaactcatctaccatttcattgattttagcagtgaaataagctttcaatgcacgggcactgatactattgaaaacgagttgatcttcaaattccgccatttaagttcaccaaacaacttttaaatacaaatatatcaatagtagtagaataagaactataaaaaaaataataattaaccaaccccaacaaccggtattattagttgatgtggtagttttctcatcacttagaacagatttaacaatttctataaagtctgtcaaatcatcttccggagaccccataaatacaccaaatatagcggcgtacaacttatccatttatacattgaatattggcttttctttatcgctatcttcatcatattcatcatcaatatcaacaagtcccagattacgagccagatcttcttctacattttcagtcattgatacacgttcactatctccagagagtccgataacgttagccaccacttctctatcaatgattagtttcttgagcgcgaaagtaatttttgtttccgttccggatctatagaagacgataggtgtgataattgccttggccaattgtctttctcttttactgagtgattctagttcaccttctatagatctgagaatggatgattctccagtcgaaacatattctaccatggatccgtttaatttgttgatgaagatggattcatccttaaatgttttctctgtaatagtttccaccgaaagactatgcaaagaatttggaatgcgttccttgtgcttaatgtttccatagacggcttctagaagttgatacaacataggactagccgcggtaacttttatttttagaaagtatccatcgcttctatcttgtttagatttatttttataaagtttagtctctccttccaacataataaaagtggaagtcatttgactagataaactatcagtaagttttatagagatagacgaacaattagcgtattgagaagcatttagtgtaacgtattcgatacattttgcattagatttactaatcgattttgcatactctataacacccgcacaagtctgtagagaatcgctagatgcagtaggtcttggtgaagtttcaactctcttcttgattaccttactcatgattaaacctaaataattgtactttgtaatataatgatatatattttcactttatctcatttgagaataaaaatgtttttgtttaaccactgcatgatgtacagatttcggaatcgcaaaccaccagtggttttattttatccttgtccaatgtgaattgaatgggagcggatgcgggtttcgtacgtagatagtacattcccgtttttagaccgagactccatccgtaaaaatgcatactcgttagtttggaataactcggatctgctatatggatattcatagattgactttgatcgatgaaggctcccctgtctgcagccatttttatgatcgtcttttgtggaatttcccaaatagttttataaactcgcttaatatcttctggaaggtttgtattctgaatggatccaccatctgccataatcctattcttgatctcatcattccataattttctctcggttaaaactctaaggagatgcggattaactacttgaaattctccagacaatactctccgagtgtaaatattactggtatacggttccaccgactcattatttcccaaaatttgagcagttgatgcagtcggcataggtgccaccaataaactatttctaagaccgtatgttctgattttatcttttagaggttcccaattccaaagatccgacggtacaacattccaaagatcatattgtagaataccgttactggcgtacgatcctacatatgtatcgtatggtccttccttctcagctagttcacaactcgcctctaatgcaccgtaataaatggtttcgaagatcttcttatttagatcttgtgcttccaggctatcaaatggataatttaagagaataaacgcgtccgctaatccttgaacaccaataccgataggtctatgtctcttattagagatttcagcttctggaataggataataattaatatctataattttattgagatttctgacaattactttgaccacatccttcagtttgagaaaatcaaatcgcccatctattacaaacatgttcaaggcaacagatgccagattacaaacggctacctcattagcatccgcatattgtattatctcagtgcaaagattactacacttgatagttcctaaattttgttgattactctttttgttacacgcatccttataaagaatgaatggagtaccagtttcaatctgagattctataatcgctttccagacgactcgagcctttattatagatttgtatctcctttctctttcgtatagtgtatacaatcgttcgaactcgtctccccaaacattgtccaatccaggacattcatccggacacatcaacgaccactctccgtcatccttcactcgtttcataaagagatcaggaatccaaagagctataaatagatctctggttctatgttcctcgtttcctgtattctttttaagatcgaggaacgccataatatcagaatgccacggttccaagtatatggccataactccaggccgtttgtttcctccctgatctatgtatctagcggtgttattataaactctcaacattggaataataccgtttgatataccattggtaccggagatatagcttccactggcacgaatattactaattgatagacctattccccctgccattttagagattaatgcgcatcgttttaacgtgtcatagataccctctatgctatcatcgatcatgttaagtagaaaacagctagacatttggtgacgactagttcccgcattaaataaggtaggagaagcgtgcgtaaaccatttttcagaaagtagattgtacgtctcaatagctgagtctatatcccattgatgaattcctactgcgacacgcattaacatgtgctgaggtctttcaacgatcttgttgtttattttcaacaagtaggatttttccaaagttttaaaaccaaaatagttgtatgaaaagtctcgttcgtaaataataaccgagttgagtttatccttatatttgttaactatatccatggtgatacttgaaataatcggagaatgtttcccatttttaggattaacatagttgaataaatcctccatcacttcactaaatagtttttttgtttccttgtgtagatttgatacggctattctggcggctagaatggcataatccggatgttgtgtagtacaagtggctgctatttcggctgccagagtgtccaattctaccgttgttactccattatatattccttgaataaccttcatagctattttaataggatctatatgatccgtgtttaagccataacataattttctaatacgagacgtgattttatcaaacatgacattttccttgtatccatttcgtttaatgacaaacatttttgttggtgtaataaaaaaattatttaacttttcattaatagggatttgacgtatgtagcgtacaaaatgattgttcctggtatatagataaagagtcctatatatttgaaaatcgttacggctcgattaaactttaatgattgcatagtgaatatatcattaggatttaactccttgactatcatggcggcgccagaaattaccatcaaaagcattaatacagttataccgatcgcagttagaacggttatagcatccaccatttatatctaaaaattagatcaaagaatatgtgacaaagtcctagttgtatactgagaattgacgaaacaatgtttcttacatatttttttcttattagtaaccgacttaatagtaggaactggaaaactagacttgattattctataagtatagatacccttccaaataatattctctttgataaaagttccagaaaatgtagaattttttaaaaagttatcttttgctattaccaagattgtgtttagacgcttattattaatatgagtgatgaaatccacaccgcctctagatatcgcctttatttccacattagatggtaaatccaatagtgaaactatctttttaggaatgtatggactcgcgtttagaggagtaaacgtcttaggcgtcggaaaggatgattcatcaaacgaataaacaatttcacaaatggatgttaatgtattagtaggaaattttttgacgctattggaattgaagattctaatggatgatgttctacctatttcatccgataacatgttaatttccgacaccaacggttttaatatttcgatgatatacggtagtctctctttcggacttatatagcttattccacaatacgagtcattatatactccaaaaaacaaaataactagtataaaatctgtatcgaatgggaaaaacgaaattatcgacataggtatagaatccggaacattgaacgtattaatacttaattctttttctgtggtaagtaccgataggttattgacattgtatggttttaaatattctataacttgagacttgatagatattagtgatgaattgaaaattatttttatcaccacgtgtgtttcaggatcatcgtcgacgcccgtcaaccaaccgaacggagtaaaataaatatcattaatatatgctctagatattagtatttttatcaatcctttgattatcatcttctcgtaggcgaatgattccatgatcaagagtgatttaagaacatcctccggagtattaatgggcttagtaaacagtccatcgttgcaataataaaagttatccaagttaaaggatattatgcattcgtttaaagatatcacctcatctgacggagacaattttttggtaggttttagagactttgaagctacttgtttaacaaagttattcatcgtcgtctactattctatttaattttgtagttaatttatcacatatcacattaattgactttttggtccacttttccatacgtttatattcttttaatcctgcgttatccgtttccgttatatccagggatagatcttgcaagttaaatagaatgctcttaaataatgtcattttcttatccgctaaaaatttaaagaatgtataaacctttttcagagatttgaaactcttaggtggtgtcctagtacacaatatcataaacaaactaataaacattccacattcagattccaacagctgattaacttccacattaatacagcctattttcgctccaaatgtacattcgaaaaatctgaataaaacatcgatgtcacaatttgtattatccaatacagaatgtttgtgattcgtgttaaaaccatcggagaaggaatagaaataaaaattattatagtggtggaattcagttggaatattgcctccggagtcataaaaggatactaaacattgttttttatcataaattacacatttccaatgagacaaataacaaaatccaaacattacaaatctagaggtagaacttttaattttgtctttaagtatatacgataagatatgtttattcataaacgcgtcaaatttttcatgaatcgctaaggagtttaagaatctcatgtcaaattgtcctatataatccacttcggatccataagcaaactgagagactaagttcttaatacttcgattgctcatccaggctcctctctcaggctctattttcatcttgacgacctttggattttcaccagtatgtattcctttacgtgataaatcatcgattttcaaatccatttgtgagaagtctatcgccttagatactttttcccgtagtcgaggtttaaaaaaatacgctaacggtatactagtaggtaactcaaagacatcatatatagaatggtaacgcgtctttaactcgtcggttaactctttcttttgatcgagttcgtcgctactattgggtctgctcaggtgccccgactctactagttccaacatcataccgataggaatacaagacactttgccggcggttgtagatttatcatatttttccactacatatccgttacaatttgttaaaaatttagatacatctatattgctacataatccagctagtgaatatatatgacataataaattggtaaatcctagttctggtattttactaattactaaatctgtatatctttccatttatcatggaaaagaatttaccagatatcttcttttttccaaactgcgttaatgtattctcttacaaatattcacaagatgaattcagtaatatgagtaaaacggaacgtgatagtttctcattggccgtgtttccagttataaaacatagatggcataacgcacacgttgtaaaacataaaggaatatacaaagttagtacagaagcacgtggaaaaaaagtatctcctccatcactaggaaaacccgcacacataaacctaaccgcgaagcaatatatatacagtgaacacacaataagctttgaatgttatagttttctaaaatgtataacaaatacagaaatcaattcgttcgatgagtatatattaagaggactattagaagctggtaatagtttacagatattttccaattccgtaggtaaacgaacagatactataggtgtactagggaataagtatccatttagcaaaattccattggcctcattaactcctaaagcacaacgagagatattttcagcgtggatttctcatagacctgtagttttaactggaggaactggagtgggtaagacgtcacaggtacccaagttattgctttggtttaattatttatttggtggattctctactctagataaaatcactgactttcacgaaagaccagtcattctatctcttcctaggatagctttagttagattgcatagcaataccattttaaaatcattgggatttaaggtactagatggatctcctatttctttacggtacggatctataccggaagaattaataaacaaacaaccaaaaaaatatggaattgtattttctacccataagttatctctaacaaaactatttagttatggcactcttattatagacgaagttcatgagcatgatcaaataggagatattattatagcagtagcgagaaagcatcatacgaaaatagattctatgtttttaatgactgccacgttagaggatgacagggaacggctaaaagtatttttacctaatcccgcatttatacatattcctggagatacactgtttaaaattagcgaggtatttattcataataagataaatccatcttccagaatggcatacatagaagaagaaaagagaaatttagttactgctatacagatgtatactcctcctgatggatcatccggtatagtctttgtggcatccgttgcacagtgtcacgaatataaatcatatttagaaaaaagattaccgtatgatatgtatattattcatggtaaggtcttagatatagacgaaatattagaaaaagtgtattcatcacctaatgtatcgataattatttctactccttatttggaatccagcgttactatacgcaatgttacacacatttatgatatgggtagagtttttgtccccgctccttttggaggatcgcaacaatttatttctaaatctatgagagatcaacgaaaaggaagagtaggaagagttaatcctggtacatacgtctatttctatgatctgtcttatatgaagtctatacagcgaatagattcagaatttctacataattatatattgtacgctaataagtttaatctaacactccccgaagatttgtttataatccctacaaatttggatattctatggcgtacaaaggaatatatagactcgttcgatattagtacagaaacatggaataaattattatccaattattatatgaagatgatagagtatgctaaactttatgtactaagtcctattctcgctgaggagttggataactttgagaggacgggagaattaactagtattgtacgagaagccattttatctctaaatttacaaattaagattttaaattttaaacataaagatgatgatacgtatatacacttttgtaaaatattattcggtgtctataacggaacaaacgctactatatattatcatagacctctaacgggatatatgaatatgatttcagatactatatttgttcctgtagataataactaaaaatcaaactctaatgaccacatctttttttagagatgaaaaattttccacatctccttttgtagacacgactaaacattttgcagaaaaaagtttattagtgtttagataatcgtatacttcatcagtgtagatagtaaatgtgaacagataaaaggtattcttgctcaatagattggtaaattccatagaatatattaatcctttcttcttgagatcccacatcatttcaaccagagacgttttatccaatgatttacctcgtactataccacatacaaaactagattttgcagtgacgtcgtacctggtattcctaccaaacaaaattttacttttagttcttttagaaaattctaaggtagaatctctatttgccaatatgtcatctatggaattaccactagcaaaaaatgatagaaatatatattgatacatcgcagctggttttgatctactatactttaaaaacgaatcagattccataattgcctgtatatcatcagctgaaaaactatgttttacacgtattccttcggcatttctttttaatgatatatcttgtttagacaatgataaagttatcatgtccatgagagacgcgtctccgtatcgtataaatatttcattagatgttagacgcttcattaggggtatacttctataaggtttcttaatcagtccatcattggttgcgtcaagaactactatcggatgttgttgggtatctctagtgttacacatggccttactaaagtttgggtaaataactatgatatctctattaattatagatgcatatatttcattcgtcaaggatattagtatcgacttgctatcgtcattaatacgtgtaatgtaatcatataaatcatgcgatagccaaggaaaatttaaatagatgttcatcatataatcgtcgctataattcatattaatacgttgacattgactaatttgtaatatagcctcgccacgaagaaagctctcgtattcagtttcatcgataaaggataccgttaaatataactggttgccgatagtctcatagtctattaagtggtaagtttcgtacaaatacagaatccctaaaatattatctaatgttggattaatctttaccataactgtataaaatggagacggagtcataactattttaccgtttgtacttactggaatagatgaaggaataatctccggacatgctggtaaagacccaaatgtctgtttgaagaaatccaatgttccaggtcctaatctcttaacaaaaattacgatattcgatcccgatatcctttgcattctatttaccagcatatcacgaactatattaagattatctatcatgtctattctcccaccgttatataaatcgcctccgctaagaaacgttagtatatccatacaatggaatacttcatttctaaaatagtattcgttttctaattctttaatgtgaaatcgtatactagaaagggaaaaattatctttgagttttccgttagaaaagaaccacgaaactaatgttctgattgcgtccgattccgttgctgaattaatggatttacaccaaaaactcatataacttctagatgtagaagcattcgctaaaaaattagtagaatcaaaggatataagtagatgttccaacaagtgagcaattcccaagatttcatctatatcattctcgaatccgaaattagaaattcccaagtagatatcctttttcatccgatcgttgatgaaaatacgaactttattcggtaagacaatcatttactaaggagtaaaataggaagtaatgttcgtatgtcgttatcatcgtataaattaaaggtgtgttttttaccattaagtgacattataattttaccaatattggaattataatataggtgtatttgcgcactcgcgacggttgatgcatcggtaaatatagctgtatctaatgttctagtcggtatttcatcatttcgctgtctaataatagcgttttctctatctgtttccattacagctgcctgaagtttattggtcggataatatgtaaaataataagaaatacatacgaataacaaaaataaaataagatataataaagatgccatttagagatctaattttgtttaacttgtccaaattcctacttacagaagatgaggaatcgttggagatagtgtcttccttatgtagaggatttgaaatatcttataatgacttgataacttactttccagataggaaataccataaatatatttataaagtatttgaacatgtagatttatcggaggaattaagtatggaattccatgatacaactctgagagatttagtctatcttagattgtacaagtattccaagtgtatacggccgtgttataaattaggagataatctaaaaggcatagttgttataaaggacaggaatatttatattagggaagcaaatgatgacttgatagaatatctcctcaaggaatacactcctcagatttatacatattctaatgagcgcgtccccataactggttcaaaattaattctttgtggattttctcaagttacatttatggcgtatacaacgtcgcatataacaacaaataaaaaggtagatgttctcgtttccaaaaaatgtatagatgaactagtcgatccaataaattatcaaatacttcaaaatttatttgataaaggaagcggaacaataaacaaaatactcaggaagatattttattcggtaacaggtggccaaactccataggtagctttttctatttcggattttagaatttccaaattcaccagcgatttatcggttttggtgaaatccaaggatttattaatgtccacaaatgccatttgttttgtctgtggattgtatttgaaaatggaaacgatgtagttagatagatgcgctgcgaagtttcctattagggttccgcgcttcacgtcacccagcatacttgaatcaccatcctttaaaaaaaatgataagatatcaacatggagtatatcatactcgaattttaattcttctactgactcactgacattttcacaaatactacaatacggtttaccgaaaataatcagtacgttcttcatttatgggtatcaaaaacttaaaatcgttactgctggaaaataaatcactgacgatattagatgataatttatacaaagtatacaatggaatatttgtggatacaatgagtatttatatagccgtcgccaattgtgtcagaaacttagaagagttaactacggtattcataaaatacgtaaacggatgggtaaaaaagggagggcatgtaaccctttttatcgatagaggaagtataaaaattaaacaagacgttagagacaagagacgtaaatattctaaattaaccaaggacagaaaaatgttagaattagaaaagtgtacatccgaaatacaaaatgttaccggatttatggaagaagaaataaaggcagaaatgcaattaaaaatcgataaactcacatttcaaatatatttatctgattctgataacataaaaatatcattgaatgagatactaacacatttcaacaataatgagaatgttacattattttattgtgatgaacgagacgcagaattcgttatgtgtctcgaggctaaaacacatttctctaccacaggagaatggccgttgataataagtaccgatcaggatactatgctatttgcatctgctgataatcatcctaagatgataaaaaacttaactcaactgtttaaatttgttccctcggcagaggataactatttagcaaaattaacggcgttagtgaatggatgtgatttctttcctggactctatggggcatctataacacccaccaacttaaacaaaatacaattgtttagtgattttacaatcgataatatagtcactagtttggcaattaaaaattattatagaaagactaactctaccgtagacgtgcgtaatattgttacgtttataaacgattacgctaatttagacgatgtctactcgtatattcctccttgtcaatgcactgttcaagaatttatattttccgcattagatgaaaaatggaatgaatttaaatcatcttatttagaaagcgtgccgttaccctgccaattaatgtacgcgttagaaccacgcaaggagattgatgtttcagaagttaaaactttatcatcttatatagatttcgaaaatactaaatcagatatcgatgttataaaatctatatcctcgatcttcggatattctaacgaaaactgtaacacgatagtattcggcatctataaggataatttactactgagtataaataattcattttactttaacgatagtctgttaataaccaatactaaaagtgataatataataaatataggttactagattaaaaatggtgttccaactcgtgtgctctacatgcggtaaagatatttctcacgaacgatataaattgattatacgaaaaaaatcattaaaggatgtactcgtcagtgtaaagaacgaatgttgtaggttaaaattatctacacaaatagaacctcaacgtaacttaacagtgcaacctctattggatataaactaatatggatccggttaattttatcaagacatatgcgcctagaggttctattatttttattaattataccatgtcattaacaagtcatttgaatccatcgatagaaaaacatgtgggtatttattatggtacgttattatcggaacacttggtagttgaatctacctatagaaaaggagttcgaatagtcccattggatagtttttttgaaggatatcttagtgcaaaagtatacatgttagagaatattcaagttatgaaaatagcagctgatacgtcattaactttattgggtattccgtatggatttggtcatgatagaatgtattgttttaaattggtagctgactgttataaaaatgccggtattgatacatcgtctaaacgaatattgggcaaagatatttttctgagccaaaacttcacagacgataatagatggataaagatatatgattctaataatttaacattttggcaaattgattaccttaaagggtgagttaatatgcataactactcctccgttgttttttccctcgttctttttcttaacgttgtttgccatcactctcataatgtaaagatattctaaaatggtaaacttttgcatatcggacgcagaaattggtataaatgttgtaattgtattatttcccgtcaatggactagtcacagctccatcagttttatatcctttagagtatttctcactcgtgtctaacattctagagcattccatgatctgtttatcgttgatattggccggaaagatagattttttattttttattatattactattggcaattgtagatataacttctggtaaatatttttctaccttttcaatctcttctattttcaagccggctatatattctgctatattgttgctagtatcaataccttttctggctaagaagtcatatgtggtattcactatatcagttttaactggtagttccattagcctttccacttctgcagaataatcagaaattggttctttaccagaaaatccagctactataataggctcaccgatgatcattggcaaaatcctatattgtaccagattaatgagagcatatttcatttccaataattctgctagttcttgagacattgatttatttgatgaatctagttggttctctagatactctaccatttctgccgcatacaataacttgttagataaaatcagggttatcaaagtgtttagcgtggctagaatagtgggcttgcatgtattaaagaatgcggtagtatgagtaaaccgttttaacgaattatatagtctccagaaatctgtggcgttacatacatgagccgaatgacatcgaagattgtccaatatttttaatagctgctctttgtccattatttctatatttgactcgcaacaattgtagataccattaatcaccgattcctttttcgatgccggacaatagcacaattgtttagctttggactctatgtattcagaattaatagatatatctctcaatacagattgcactatacattttgaaactatgtcaaaaattgtagaacgacgctgttctgcagccatttaactttaaataatttacaaaaatttaaaatgagcatccgtataaaaatcgataaactgcgccaaattgtggcatatttttcagagttcagtgaagaagtgtctataaatgtagactcgacggatgagttaatgtatatttttgccgccttgggcggatctgtaaacatttgggcaattatacctctaagtgcatcagtgttttaccgaggagccgaaaatattgtgtttaatcttcctgtgtccaaggtaaaatcgtgtttgtgtagttttcacaatgatgccatcatagatatagaacctgatctggaaaataatctagtaaaactttctagttatcatgtagtaagtgtcgattgtaacaaggaactgatgcctattaggacagatactactatttgtctaagtatagatcaaaagaaatcttacgtgtttaattttcacaagtatgaagaaaaatgttgtggtagaaccgtcattcatctagaatggttgttgggctttatcaagtgtattagtcagcatcagcatctggctattatgtttaaagatgacaatattattatgaagactcctggtaatactgatgcgttttccagggaatattctatgactgaatgttctcaagaactacaaaagttttctttcaaaatagctatctcgtctctcaacaaactacgaggattcaaaaagagagtcaatgtttttgaaactagaatcgtaatggataatgacgataacattttaggaatgttgttttcggatagagttcaatcctttaagatcaacatctttatggcgtttttagattaatactttcaatgagataaatatgggtggcggagtaagtgttgagctccctaaacgggatccgcctccgggagtacccactgatgagatgttattaaacgtggataaaatgcatgacgtgatagctcccgctaagcttttagaatatgtgcatataggaccactagcaaaagataaagaggataaagtaaagaaaagatatccagagtttagattagtcaacacaggacccggtggtctttcggcattgttaagacaatcgtataatggaaccgcacccaattgctgtcgcacttttaatcgtactcattattggaagaaggatggaaagatatcagataagtatgaagagggtgcagtattagaatcgtgttggccagacgttcacgacactggaaaatgcgatgttgatttattcgactggtgtcagggggatacgttcgatagaaacatatgccatcagtggatcggttcagcctttaataggagtaatagaactgtagagggtcaacaatcgttaataaatctgtataataagatgcaaacattatgtagtaaagatgctagtgtaccaatatgcgaatcatttttgcattatttacgcgcacacaatacagaagatagcaaagagatgatcgattatattctaagacaacagtctgcggactttaaacagaaatatatgagatgtagttatcccactagagataagttagaagagtcattaaaatatgcggaacctcgagaatgttgggatccagagtgttcgaatgccaatgttaatttcttactaacacgtaattataataatttaggactttgcaatattgtacgatgtaataccagcgtgaacaacttacagatggataaaacttcctcattaagattgtcatgtggattaagcaatagtgatagattttctactgttcccgtcaatagagcaaaagtagttcaacataatattaaacactcgttcgacctaaaattgcatttgatcagtttattatctctcttggtaatatggatactaattgtagctatttaaatgggtgccgcggcaagcatacagacgacggtgaatacactcagcgaacgtatctcgtctaaattagaacaagaagcgaacgctagtgctcaaacaaaatgtgatatagaaatcggaaatttttatatccgacaaaaccatggatgtaacctcactgttaaaaatatgtgctctgcggacgcggatgctcagttggatgctgtgttatcagccgctacagaaacatatagtggattaacaccggaacaaaaagcatacgtgccagctatgtttactgctgcgttaaacattcagacgagtgtaaacactgttgttagagattttgaaaattatgtgaaacagacttgtaattctagcgcggtcgtcgataacaaattaaagatacaaaacgtaatcatagatgaatgttacggagccccaggatctccaacaaatttggaatttattaatacaggatctagcaaaggaaattgtgccattaaagcgttgatgcaattgacgactaaggccactactcaaatagcacctagacaagttgctggtacaggagttcagttttatatgattgttatcggtgttataatattggcagcgttgtttatgtactatgccaagcgtatgttgttcacatccaccaatgataaaatcaaacttattttagccaataaggaaaacgtccattggactacttacatggacacattctttagaacttctccgatggttattgctaccacggatatgcaaaactgaaaatatattgataatattttaatagattaacatggaagttatcgctgatcgtctagacgatatagtgaaacaaaatatagcggatgaaaaatttgtagattttgttatacacggtctagagcatcaatgtcctgctatacttcgaccattaattaggttgtttattgatatactattatttgttatagtaatttatatttttacggtacgtctagtaagtagaaattatcaaatgttgttggtggtgctagtcatcacattaactattttttattactttatactataatagtactagactgacttctaacaaacatctcacctgccataaataaatgcttgatattaaagtcttctatttctaacactattccatctgtggaaaataatactctgacattatcgctaattgacacatcggtgagtgatatgcctataaagtaataatcttctttgggcacatataccagtgtaccaggttctaacaacctatttactggtgctcctgtagcatactttttctttaccttgagaatatccatcgtttgcttggtcaatagcgatatgtgattttttatcaaccactcaaaaaagtaattggagtgttcatatcctctacgggctattgtctcatggccgtgtatgaaatttaagtaacacgactgtggtagatttgttctatagagccgattgccgcaaatagatagaactaccaatatgtctgtacaaatgttaaacattaattgattaacagaaaaaacaatgttcgttctgggaatagaaaccagatcaaaacaaaattcgttagaatatatgccacgtttatacatggaatataaaataactacagtttgaaaaataacagtatcatttaaacatttaacttgcggggttaatctcacaactttactgtttttgaactgttcaaaatatagcatcgatccgtgagaaatacgtttagccgcctttaatagaggaaatcccaccgcctttctggatctcaccaacgacgatagttctgaccagcaactcatttcttcatcatccacctgttttaacatataataggcaggagatagatatccgtcattgcaatattccttctcgtaggcacacaatctaatattgataaaatctccattctcttctctgcatttattatcttgtctcggtggctgattaggctgtggtcttggtttaggccttggtctatcgttgttgaatctattttggtcattaaatctttcatttcttcctggtatatttctatcacctcgtttggttggatttttgtctatattatcgtttgtaacatcggtacgggtattcatttatcacaaaaaaaacttctctaaatgagtctactgctagaaaacctcatcgaagaagataccatattttttgcaggaagtatatctgagtatgatgatttacaaatggttattgccggcgcaaaatccaaatttccaagatctatgctttctatttttaatatagtacctagaacgatgtcaaaatatgagttggagttgattcataacgaaaatatcacaggagcaatgtttaccacaatgtataatataagaaacaatttgggtctaggagatgataaactaactattgaagccattgaaaactatttcttggatcctaacaatgaagttatgcctcttattattaataatacggatatgactgccgtcattcctaaaaaaagtggtaggagaaagaataagaacatggttatcttccgtcaaggatcatcacctatcttgtgcattttcgaaactcgtaaaaagattaatatttataaagaaaatatggaatccgcgtcgactgagtatacacctatcggagacaacaaggctttgatatctaaatatgcgggaattaatgtcctgaatgtgtattctccttccacatccataagattgaatgccatttacggattcaccaataaaaataaactagagaaacttagtactaataaggaactagaatcgtatagttctagccctcttcaagaacccattaggttaaatgattttctgggactattggaatgtgttaaaaagaatattcctctaacagatattccgacaaaggattgattactataaatggagaatgttcctaatgtatactttaatcctgtgtttatagagcccacgtttaaacattctttattaagtgtttataaacacagattaatagttttatttgaagtattcgttgtattcattctaatatatgtattttttagatctgaattaaatatgttcttcatgcctaaacgaaaaatacccgatcctattgatagattacgacgtgctaatctagcgtgtgaagacgataaattaatgatctatggattaccatggatgacaactcaaacatctgcgttatcaataaatagtaaaccgatagtgtataaagattgtgcaaagcttttgcgatcaataaatggatcacaaccagtatctcttaacgatgttcttcgcagatgatgattcattttttaagtatttggctagtcaagatgatgaatcttcattatctgatatattgcaaatcactcaatatctagactttctgttattattattgatccaatcaaaaaataaattagaagctgtgggtcattgttatgaatctctttcagaggaatacagacaattgacaaaattcacagactttcaagattttaaaaaactgtttaacaaggtccctattgttacagatggaagggtcaaacttaataaaggatatttgttcgactttgtgattagtttgatgcgattcaaaaaagaatcctctctagctaccaccgcaatagatcctgttagatacatagatcctcgtcgcaatatcgcattttctaacgtgatggatatattaaagtcgaataaagtgaacaataattaattctttattgtcatcatgaacggcggacatattcagttgataatcggccccatgttttcaggtaaaagtacagaattaattagacgagttagacgttatcaaatagctcaatataaatgcgtgactataaaatattctaacgataatagatacggaacgggactatggacgcatgataagaataattttgaagcattggaagcaactaaactatgtgatgtcttggaatcaattacagatttctccgtgataggtatcgatgaaggacagttctttccagacattgtttaattctgtgagcgtatggcaaacggtaccgagctcttttttttttttttttttttggcatataaataagtcgactccctatcagtgatagagaatggtgaagcgtgagaaaaatgtcatctatggccctgagcctctccatcctttggaggatttgactgccggcgaaatgctgtttcgtgctctccgcaagcactctcatttgcctcaagccttggtcgatgtggtcggcgatgaatctttgagctacaaggagttttttgaggcaaccgtcttgctggctcagtccctccacaattgtggctacaagatgaacgacgtcgttagtatctgtgctgaaaacaatacccgtttcttcattccagtcatcgccgcatggtatatcggtatgatcgtggctccagtcaacgagagctacattcccgacgaactgtgtaaagtcatgggtatctctaagccacagattgtcttcaccactaagaatattctgaacaaagtcctggaagtccaaagccgcaccaactttattaagcgtatcatcatcttggacactgtggagaatattcacggttgcgaatctttgcctaatttcatctctcgctattcagacggcaacatcgcaaactttaaaccactccacttcgaccctgtggaacaagttgcagccattctgtgtagcagcggtactactggactcccaaagggagtcatgcagacccatcaaaacatttgcgtgcgtctgatccatgctctcgatccacgcgtgggcactcagctgattcctggtgtcaccgtcttggtctacttgcctttcttccatgctttcggctttagcattactttgggttactttatggtcggtctccgcgtgattatgttccgccgttttgatcaggaggctttcttgaaagccatccaagattatgaagtccgcagtgtcatcaacgtgcctagcgtgatcctgtttttgtctaagagcccactcgtggacaagtacgacttgtcttcactgcgtgaattgtgttgcggtgccgctccactggctaaggaggtcgctgaagtggccgccaaacgcttgaatcttccagggattcgttgtggcttcggcctcaccgaatctaccagcgctaacattcactctctcggggatgagtttaagagcggctctttgggccgtgtcactccactcatggctgctaagatcgctgatcgcgaaactggtaaggctttgggcccgaaccaagtgggcgagctgtgtatcaaaggccctatggtgagcaagggttatgtcaataacgttgaagctaccaaggaggccatcgacgacgacggctggttgcattctggtgattttggatattacgacgaagatgagcatttttacgtcgtggatcgttacaaggagctgatcaaatacaagggtagccaggttgctccagctgagttggaggagattctgttgaaaaatccatgcattcgcgatgtcgctgtggtcggcattcctgatctggaggccggcgaactgccttctgctttcgttgtcaagcagcctggtaaagaaattaccgccaaagaagtgtatgattacctggctgaacgtgtgagccatactaagtacttgcgtggcggcgtgcgttttgttgactccatccctcgtaacgtaacaggcaaaattacccgcaaggagctgttgaaacaattgttggagaaggccggcggtggttccggagccacgaacttctctctgttaaagcaagcaggagacgtggaagaaaaccccggtcccatggcctcctccgaggacgtcatcaaggagttcatgcgcttcaaggtgcgcatggagggctccgtgaacggccacgagttcgagatcgagggagagggcgagggccgcccctacgagggcacccagaccgccaagctgaaggtgaccaagggcggccccctgcccttcgcctgggacatcctgtcccctcagttccagtacggctccaaggcctacgtgaagcaccccgccgacatccccgactacttgaagctgtccttccccgagggcttcaagtgggagcgcgtgatgaacttcgaggacggcggcgtggtgaccgtgacccaggactcctccctgcaggacggcgagttcatctacaaggtgaagctgcgcggcaccaacttcccctccgacggccccgtaatgcagaagaagaccatgggctgggaggcctccaccgagcggatgtaccccgaggacggcgccctgaagggcgagatcaagatgaggctgaagctgaaggacggcggccactacgacgccgaggtcaagaccacctacatggccaagaagcccgtgcagctgcccggcgcctacaagaccgacatcaagctggacatcacctcccacaacgaggactacaccatcgtggaacagtacgagcgcgccgagggccgccactccaccggcgcctaattaattaatttttatcgatctaattcaacaatgtctggagagctcggatccttctgtgagcgtatggcaaacgaaggaaaaatagttatagtagccgcactcgatgggacatttcaacgtaaaccgtttaataatattttgaatcttattccattatctgaaatggtggtaaaactaactgctgtgtgtatgaaatgctttaaggaggcttccttttctaaacgattgggtgaggaaaccgagatagaaataataggaggtaatgatatgtatcaatcggtgtgtagaaagtgttacatcgactcataatattatattttttatctaaaaaactaaaaataaacattgattaaattttaatataatacttaaaaatggatgttgtgtcgttagataaaccgtttatgtattttgaggaaattgataatgagttagattacgaaccagaaagtgcaaatgaggtcgcaaaaaaactgccgtatcaaggacagttaaaactattactaggagaattattttttcttagtaagttacagcgacacggtatattagatggtgccaccgtagtgtatataggatctgctcccggtacacatatacgttatttgagagatcatttctataatttaggagtgatcatcaaatggatgctaattgacggccgccatcatgatcctattttaaatggattgcgtgatgtgactctagtgactcggttcgttgatgaggaatatctacgatccatcaaaaaacaactgcatccttctaagattattttaatttctgatgtgagatccaaacgaggaggaaatgaacctagtacggcggatttactaagtaattacgctctacaaaatgtcatgattagtattttaaaccccgtggcgtctagtcttaaatggagatgcccgtttccagatcaatggatcaaggacttttatatcccacacggtaataaaatgttacaaccttttgctccttcatattcagctgaaatgagattattaagtatttataccggtgagaacatgagactgactcgagttaccaaattagacgctgtaaattatgaaaaaaagatgtactaccttaataagatcgtccgtaacaaagtagttgttaactttgattatcctaatcaggaatatgactattttcacatgtactttatgctgaggaccgtgtactgcaataaaacatttcctactactaaagcaaaggtactatttctacaacaatctatatttcgtttcttaaatattccaacaacatcaactgaaaaagttagtcatgaaccaatacaacgtaaaatatctagcaaaaattctatgtctaaaaacagaaatagcaagagatccgtacgcggtaataaatagaaacgtactactgagatatactaccgatatagagtataatgatttagttactttaataaccgttagacataaaattgattctatgaaaactgtgtttcaggtatttaacgaatcatccataaattatactccggttgatgatgattatggagaaccaatcattataacatcgtatcttcaaaaaggtcataacaagtttcctgtaaattttctatacatagatgtggtaatatctgacttatttcctagctttgttagactagatactacagaaactaatatagttaatagtgtactacaaacaggcgatggtaaaaagactcttcgtcttcccaaaatgttagagacggaaatagttgtcaagattctctatcgccctaatataccattaaaaattgttagatttttccgcaataacatggtaactggagtagagatagccgatagatctgttatttcagtcgctgattaatcaattagtagagatgagataagaacattataataatcaataatatatcttatatcttatatcttatatcttatatcttgtttagaaaaatgctaatattaaaatagctaacgctagtaatccaatcggaagccatttgatatctataatagggtatctaatttcctgatttaaatagcggacagctatattctcggtagctactcgtttggaatcacaaacattatttacatctaatttactatctgtaatggaaacgtttcccaatgaaatggtacaatccgatacattgcattttgttatatttttttttaaagaggctggtaacaacgcatcgcttcgtttacatggctcgtaccaacaataatagggtaatcttgtatctattcctatccgtactatgcttttatcaggataaatacatttacatcgtatatcgtctttgttagcatcacagaatgcataaatttgttcgtccgtcatgataaaaatttaaagtgtaaatataactattatttttatagttgtaataaaaagggaaatttgattgtatactttcggttctttaaaagaaactgacttgataaaaatggctgtaatctctaaggttacgtatagtctatatgatcaaaaagagattaatgctacagatattatcattagtcatgttaaaaatgacgacgatatcggtaccgttaaagatggtagactaggtgctatggatggggcattatgtaagacttgtgggaaaacggaattggaatgtttcggtcactggggtaaagtaagtatttataaaactcatatagttaagcctgaatttatttcagaaattattcgtttactgaatcatatatgtattcactgcggattattgcgttcacgagaaccgtattccgacgatattaacctaaaagagttatcgggacacgctcttaggagattaaaggataaaatattatccaagaaaaagtcatgttggaacagtgaatgtatgcaaccgtatcaaaaaattactttttcaaagaaaaaggtttgtttcgtcaacaagttggatgatattaacgttcctaattctctcatctatcaaaagttaatttctattcatgaaaagttttggccattattagaaattcatcaatatccagctaacttattttatacagactactttcccatccctccgttgattattagaccggctattagtttttggatagatagtatacccaaagagaccaatgaattaacttacttattaggtatgatcgttaagaattgtaacttgaatgctgatgaacaggttatccagaaggcggtaatagaatacgatgatattaaaattatttctaataacactaccagtatcaatttatcatatattacatccggcaaaaataatatgattagaagttatatcgtcgcccgacgaaaagatcagaccgctagatctgtaattggtcccagtacatctatcaccgttaatgaggtaggaatgcccgcatatattagaaatacacttacagaaaagatatttgttaatgcctttacagtggataaagttaaacaactattagcgtcaaaccaagttaaattttactttaataaacgattaaaccaattaacaagaatacgccaaggaaagtttattaaaaataaaatacatttattgcctggtgattgggtagaagtagctgttcaagaatatacaagtattatttttggaagacagccgtctctacatagatacaacgtcatcgcttcatctatcagagctaccgaaggagatactatcaaaatatctcccggaattgccaactctcaaaatgctgatttcgacggggatgaggaatggatgatattagaacaaaatcctaaagctgtaattgaacaaagtattcttatgtatccgacgacgttactcaaacacgatattcatggagcccccgtttatggatctattcaagatgaaatcgtagcagcgtattcattgtttaggatacaagatctttgtttagatgaagtattgaacatcttggggaaatatggaagagagttcgatcctaaaggtaaatgtaaattcagcggtaaagatatctatacttacttgataggtgaaaagattaattatccgggtctcttaaaggatggtgaaattattgcaaacgacgtagatagtaattttgttgtggctatgaggcatctgtcattggctggactcttatccgatcataagtcgaacgtggaaggtatcaactttattatcaagtcatcttatgtttttaagagatatctatctatttacggttttggggtgacattcaaagatctgagaccaaattcgacgttcactaataaattggaggccatcaacgtagaaaaaatagaacttatcaaagaagcatacgccaaatatctcaacgatgtaagagacgggaaaatagttccattatctaaagctttagaggcggactatgtggaatccatgttatccaacttgacaaatcttaatatccgagagatagaagaacatatgagacaaacgctgatagatgatccagataataacctcctgaaaatggccaaagcgggttataaagtaaatcccacagaactaatgtatattctaggtacgtatggacaacaaaggattgatggtgaaccagcagagactcgagtattgggtagagttttaccttactatcttccagactctaaggatccagaaggaagaggttacattcttaattctttaacaaaaggattaacgggttctcaatattacttttcgatgctggttgccagatctcaatctactgatatcgtctgtgaaacatcacgtaccggaacactggctagaaaaatcattaaaaagatggaggatatggtggtcgacggatacggacaagtagttataggtaatacgctcatcaagtacgccgccaattataccaaaattctaggctcagtatgtaaacctgtagatcttatctatccagatgagtccatgacttggtatttggaaattagtgctctgtggaataaaataaaacagggattcgtttactctcagaaacagaaacttgcaaagaagacattggcgccgtttaatttcctagtattcgtcaaacccaccactgaggataatgctattaaggttaaggatctgtacgatatgattcataacgtcattgatgatgtgagagagaaatacttctttacggtatctaatatagattttatggagtatatattcttgacgcatcttaatccttctagaattagaattacaaaagaaacggctatcactatctttgaaaagttctatgaaaaactcaattatactctaggtggtggaactcctattggaattatttctgcacaggtattgtctgagaagtttacacaacaagccctgtccagttttcacactactgaaaaaagtggtgccgtcaaacaaaaacttggtttcaacgagtttaataacttgactaatttgagtaagaataagaccgaaattatcactctggtatccgatgatatctctaaacttcaatctgttaagattaatttcgaatttgtatgtttgggagaattaaatccaaacatcactcttcgaaaagaaacagataaatatgtagtagatataatagtcaatagattatacatcaagagagcagaaataaccgaattagtcgtcgaatatatgattgaacgatttatctcctttagcgtcattgtaaaggaatggggtatggagacattcattgaggacgaggataatattagatttactgtctacctaaatttcgttgaaccggaagaattgaatcttagtaagtttatgatggttcttccgggggcagccaacaagggaaagattagtaaattcaagattcctatctctgattatacgggatatgacgacttcaatcaaacaaaaaagctcaataagatgactgtagaactcatgaatctaaaagaattgggttctttcgatttggaaaacgtcaacgtgtatcctggagtatggaatacatacgatatcttcggtatcgaggccgctcgtgaatacttgtgcgaagccatgttaaacacctatggagaagggttcgattatctgtatcagccttgtgatcttctcgctagtttactatgtgctagttacgaaccagaatcagtgaataaattcaagttcggcgcagctagtactcttaagagagctacgttcggagacaataaagcattgttaaacgcggctcttcataaaaagtcagaacctattaacgataatagtagctgccacttttttagcaaggtccctaatataggaactggatattacaaatactttatcgacttgggtcttctcatgagaatggaaaggaaactatctgataagatatcttctcaaaagatcaaggaaatggaagaaacagaagacttttaattcttatcaataacatatttttctatgatctgtcttttaaacgatggattttccacaaatgcgcctctcaagtccctcatagaatgatacacgtataaaaaatatagcataggcaatgactccttatttttagacattagatatgccaaaatcatagccccgcttctatttactcccgcagcacaatgaaccaacacgggctcgtttcgttgatcacatttagataaaaaggcggttacgtcgtcaaaatatttactaatatcggtagttgtatcatctaccaacggtatatgaataatattaatattagagttaggtaatgtatatttatccatcgtcaaatttaaaacatatttgaacttaacttcagatgatggtgcatccatagcatttttataatttcccaaatacacattattggttacccttgtcattatagtgggagatttggctttgtgcatatctccagttgaacgtagtagtaagtatttatacaaacttttcttatccatttataacgtacaaatggataaaactactttatcggtaaacgcgtgtaatttagaatacgttagagaaaaggctatagtaggcgtacaagcagccaaaacatcaacacttatattctttgttattatattggcaattagtgcgctattactctggtttcagacgtctgataatccagtctttaatgaattaacgagatatatgcgaattaaaaatacggttaacgattggaaatcattaacggatagcaaaacaaaattagaaagtgatagaggtagacttctagccgctggtaaggatgatatatttgaattcaaatgtgtggatttcggcgcctattttatagctatgcgattggataagaaaacatatctgccgcaagctattaggcgaggtactggagacgcgtggatggttaaaaaggcggcaaaggtcgatccatctgctcaacaattttgtcagtatttgataaaacacaagtctaataatgttattacttgtggtaatgagatgttaaatgaattaggttatagcggttattttatgtcaccgcattggtgttccgattttagtaatatggaatagtgttagataaatgcggtaacgaatgttcctgtaaggaaccataacagcttagatttaacgttaaagatgagcataaacataataaacaaaattacaatcaaacttataacattaatatcaaacaatccaaaaaatgaaatcagtggagtagtaaacgcgtacataactcctggataacgtttagcagctgccgttcctattctagaccaaaaattcggtttcatgttttcgaaacggtattctgcaacaagtcgaggatcgtgttctacatatttggcggcattatccagtatctgcctattgatcttcatttcgttttcgattctggctatttcaaaataaaatcccgatgatagacctccagactttataatttcatctacgatgttcagcgccgtagtaactctaataatataggctgataagctaacatcataccctcctgtatatgtgaatatggcatgatttttgtccattacaagctcggttttaactttattgcctgtaataatttctctcatctgtaggatatctatttttttgtcatgcattgccttcaagacgggacgaagaaacgtaatatcctcaataacgttatcgttttctacaataactacatattctacctttttattttctaactcggtaaaaaaattagaatcccatagggctaaatgtctagcgatatttcttttcgtttcctctgtacacatagtgttacaaaaccctgaaaagaagtgagtatacttgtcatcatttctaatgtttcctccagtccactgtataaacgcataatccttgtaatgatctggatcatccttgactaccacaacatttcttttttctggcataacttcgttgtcctttacatcatcgaacttctgatcattaatatgctcatgaacattaggaaatgtttctgatggaggtctatcaataactggcacaacaataacaggagttttcaccgccgccatttagttattgaaattaatcatatacaactctttaatacgagttatattttcgtctatccattgtttcacattgacatatttcgacaaaaagatataaaatgcgtattccaatgcttctctgtttaatgaattactaaaatatacaaacacgtcactgtctggcaataaatgatatcttagaatattgtaacaatttattttgtattgcacatgttcgtgatctatgagttcttcttcgaatggcataggatctccgaatctgaaaacgtataaataggagttagaataataatatttgagagtattggtaatatataaactctttagcggtataattagtttttttctctcaatttctatttttagatgtgatggaaaaatgactaattttgtagcattagtatcatgaactctaatcaaaatcttaatatcttcgtcacacgttagctctttgaagtttttaagagatgcatcagttggttctacagatggagtaggtgcaacaattttttgttctacacatgtatgtactggagccattgttttaactataatggtgcttgtatcgaaaaactttaatgcagatagcggaagctcttcgccgcgactttctacgtcgtaattgggttctaacgccgatctctgaatggatactagttttctaagttctaatgtgattctctgaaaatgtaaatccaattcctccggcattatagatgtgtatacatcggtaaataaaactatagtatccaacgatcccttctcgcaaattctagtcttaaccaaaaaatcgtatataaccacggagatggcgtatttaagagtggattcttctaccgttttgttcttggatgtcatataggaaactataaagtccgcactactgttaagaatgattactaacgcaactatatagtttaaattaagcattttggaaacataaaataactctgtagacgatacttgactttcgaataagtttgcagacaaacgaagaaagaacagacctctcttaatttcagaagaaaactttttttcgtattcctgacgtctagagtttatatcaataagaaagttaagaattagtcggttaatgttgtatttcattacccaagtttgagatttcataatattatcaaaagacatgataatattaaagataaagcgctgactatgaacgaaatagctatatggttcgctcaagaatatagtcttgttaaacgtggaaacgataactgtatttttaatcacgtcagcggcatctaaattaaatataggtatatttattccacacactctacaatatgccacaccatcttcataataaataaattcgttagcaaaattattaattttagtgaaatagttagcgtcaactttcatagcttccttcaatctaatttgatgctcacacggtgcgaattccactctaacatcccttttccatgcctcaggttcatcgatctctataatatctagttttttgcgtttcacaaacacaggctcgtctctcgcgatgagatctgtatagtaactatgtaaatgataactagatagaaagatgtagctatatagatgacgatcctttaagagaggtataataactttaccccaatcagatagactgttgttatggtcttcggaaaaagaatttttataaatttttccagtattttccaaatatacgtacttaacatctaaaaaatccttaatgataataggaatggataatccgtctattttataaagaaatacatatcgcacattatacttttttttggaaatgggaataccgatgtgtctacataaatatgcaaagtctaaatattttttagagaatcttagttggtccaaattcttttccaagtacggtaatagatttttcatattgaacggtatcttcttaatctctggttctagttccgcattaaatgatgaaactaagtcactatttttataactaacgattacatcacctctaacatcatcatttaccagaatactgatcttcttttgtcgtaaatacatgtctaatgtgttaaaaaaaagatcatacaagttatacgtcatttcatctgtggtattcttgtcattgaaggataaactcgtactaatctcttctttaacagcctgttcaaatttatatcctatatacgaaaaaatagcaaccagtgtttgatcatccgcgtcaatattctgttctatcgtagtgtataacaatcgtatatcttcttctgtgatagtcgatacgttataaaggttgataacgaaaatatttttatttcgtgaaataaagtcatcgtaggattttggacttatattcgcgtctagtagatatgcttttatttttggaatgatctcaattagaatagtctctttagagtccatttaaagttacaaacaactaggaaattggtttatgatgtataatttttttagtttttatagattctttattctatacttaaaaaatgaaaataaatacaaaggttcttgagggttgtgttaaattgaaagcgagaaataatcataaattatttcattatcgcgatatccgttaagtttgtatcgtaatggcgtggtcaattacgaataaagcggatactagtagcttcacaaagatggctgaaatcagagctcatctaaaaaatagcgctgaaaataaagataaaaacgaggatattttcccggaagatgtaataattccatctactaagcccaaaaccaaacgagccactactcctcgtaaaccagcggctactaaaagatcaaccaaaaaggaggaagtggaagaagaagtagttatagaggaatatcatcaaacaactgaaaaaaattctccatctcctggagtcagcgacattgtagaaagcgtggccgctgtagagctcgatgatagcgacggggatgatgaacctatggtacaagttgaagctggtaaagtaaatcatagtgctagaagcgatctctctgacctaaaggtggctaccgacaatatcgttaaagatcttaagaaaattattactagaatctctgcagtatcgacggttctagaggatgttcaagcagctggtatctctagacaatttacttctatgactaaagctattacaacactatctgatctagtcaccgagggaaaatctaaagttgttcgtaaaaaagttaaaacttgtaagaagtaaatgcgtgcacttttttataaagatggtaaactctttaccgataataattttttaaatcctgtatcagacgataatccagcgtatgaggttttgcaacatgttaaaattcctactcatttaacagatgtagtagtatatgaacaaacgtgggaggaggcgttaactagattaatttttgtgggaagtgattcaaaaggacgtagacaatacttttacggaaaaatgcatgtacagaatcgcaacgctaaaagagatcgtatttttgttagagtatataacgttatgaaacgaattaattgttttataaacaaaaatataaagaaatcgtccacagattccaattatcagttggcggtttttatgttaatggaaactatgttttttattagatttggtaaaatgaaatatcttaaggagaatgaaacagtagggttattaacactaaaaaataaacacatagaaataagtcccgatgaaatagttatcaagtttgtaggaaaggacaaagtttcacatgaatttgttgttcataagtctaatagactatataaaccgctattgaaactgacggatgattctagtcccgaagaatttctgttcaacaaactaagtgaacgaaaggtatacgaatgtatcaaacagtttggtattagaatcaaggatctccgaacgtatggagtcaattatacgtttttatataatttttggacaaatgtaaagtccatatctcctcttccgtcaccaaaaaagttaatagcattaactatcaaacaaactgctgaagtggtaggtcatactccatcaatttcaaaaagagcttatatggcaacgactattttagaaatggtaaaggataaaaattttttagatgtagtatctaaaactacgttcgatgaattcctatctatagtcgtagatcacgttaaatcatctacggatggatgatatagatctttacacaaataattacaagaccgataaatggaaatggataagcgtatgaaatctctcgcaatgacagctttcttcggagagctaagcacattagatattatggcattgataatgtctatatttaaacgccatccaaacaataccattttttcagtggataaggatggtcagtttatgattgatttcgaatacgataattataaggcttctcaatatttggatctgaccctcactccgatatctggagatgaatgcaagactcacgcatcgagtatagccgaacaattggcgtgtgcggatattattaaagaggatattagcgaatatatcaaaactactccccgtcttaaacgatttataaaaaaataccgcaatagatcagatactcgtatcagtcgagatacagaaaagcttaaaatagctctagctaaaggcatagattacgaatatataaaagacgcttgttaataagtaaatgaaaaaaaactagtcgtttataataaaacacgatatggatgccaacgtagtatcattttctactattgcgacgtatatagacgctttagcgaagaatgcttcggaattagaacagaggtctaccgcatacgaaataaataatgaattggaactagtatttattaagccgccattgattactttgacaaatgtagtgaatatctctacgattcaggaatcgtttattcgatttaccgttactaataaggaaggtgttaaaattagaactaagattccattatctaaggtacatggtctagatgtaaaaaatgtacagttagtagatgctatagataacatagtttgggaaaagaaatcattagtgacggaaaatcgtcttcacaaagaatgcttgttgagactatcgacagaggaacgtcatatatttttggattacaagaaatatggatcctctatccgactagaattagtcaatcttattcaagcaaaaacaaaaaactttacgatagactttaagctaaaatattttctaggatccggtgcccagtctaaaagttctttgttgcacgctattaatcatccaaagtcaaggcctaatacatctctggaaatagaattcacacctagagacaatgaaacagttccatatgatgaactaataaaggaattgacgactctctcgcgtcatatatttatggcttctccagagaatgtaattctttctccgcctattaacgcgcctataaaaacctttatgttgcctaaacaagatatagtaggtttggatctggaaaatctatatgccgtaactaagactgacggcattcctataactatcagagttacatcaaacgggttgtattgttattttacacatcttggttatattattagatatcctgttaagagaataatagattccgaagtagtagtctttggtgaggcagttaaggataagaactggaccgtatatctcattaagctaatagagcctgtgaatgcaatcaatgatagactagaagaaagtaagtatgttgaatctaaactagtggatatttgtgatcggatagtattcaagtcaaagaaatacgaaggtccgtttactacaactagtgaagtcgtcgatatgttatctacatatttaccaaagcaaccagaaggtgttattctgttctattcaaagggacctaaatctaacattgattttaaaattaaaaaggaaaatactatagaccaaactgcaaatgtagtatttaggtacatgtccagtgaaccaattatctttggagaatcgtctatctttgtagagtataagaaatttagcaacgataaaggctttcctaaagaatatggttctggtaagattgtgttatataacggcgttaattatctaaataatatctattgtttggaatatattaatacacataatgaagtgggtattaagtccgtggttgtacctattaagtttatagcagaattcttagttaatggagaaatacttaaacctagaattgataaaaccatgaaatatattaactcagaagattattatggaaatcaacataatatcatagtcgaacatttaagagatcaaagcatcaaaataggagatatctttaacgaggataaactatcggatgtgggacatcaatacgccaataatgataaatttagattaaatccagaagttagttattttacgaataaacgaactagaggaccgttgggaattttatcaaactacgtcaagactcttcttatttctatgtattgttccaaaacatttttagacgattccaacaaacgaaaggtattggcgattgattttggaaacggtgctgacctggaaaaatacttttatggagagattgcgttattggtagcgacggatccggatgctgatgctatagctagaggaaatgaaagatacaacaaattaaactctggaattaaaaccaagtactacaaatttgactacattcaggaaactattcgatccgatacatttgtctctagtgtcagagaagtattctattttggaaagtttaatatcatcgactggcagtttgctatccattattcttttcatccgagacattatgctaccgtcatgaataacttatccgaactaactgcttctggaggcaaggtattaatcactaccatggacggagacaaattatcaaaattaacagataaaaagacttttataattcataagaatttacctagtagcgaaaactatatgtctgtagaaaaaatagctgatgatagaatagtggtatataatccatcaacaatgtctactccaatgactgaatacattatcaaaaagaacgatatagtcagagtgtttaacgaatacggatttgttcttgtagataacgttgatttcgctacaattatagaacgaagtaaaaagtttattaatggcgcatctacaatggaagatagaccgtctacaaaaaactttttcgaactaaatagaggagccattaaatgtgaaggtttagatgtcgaagacttacttagttactatgttgtttatgtcttttctaagcggtaaataataatatggtatgggttctgatctcccagttctaaatgcattaaataattccaatagagcgatttttgttcctataggaccttccaactgtggatactctgtattgttaatagatatattaatacttttgtcgggtaacagaggttctacgtcttctaaaaataaaagttttataacatctggcctgttcataaataaaaacttggcgattctatatatactcttattatcaaatctagccattgtcttatagatgtgagctactgtaggtgtaccatttgattttctttctaatactatatatttctctcgaagaagttcttgcacatcatctgggaataaaatactactgttgagtaaatcagttattttttttatatcgatattgatggacatttttatagttaaggataataagtatcccaaagtcgataacgacgataacgaagtatttatacttttaggaaatcacaatgactttatcagattaaaattaacaaaattaaaggagcatgtatttttttctgaatatattgtgactccagatacatatggatctttatgcgtcgaattaaatgggtctagttttcagcacggcggtagatatatagaggtggaggaatttatagatgctggaagacaagttagatggtgttctacatccaatcatatatctaaagatatacccgaagatatgcacactgataaatttgtcatttatgatatttatacgtttgattcgttcaagaataaacgattggtattcgtacaggtacctccgtcgttaggagatgatagtcatttgactaatccgttattgtcaccgtattatcgtaattcagtagccagacaaatggtcaatgatatgatttttaatcaagattcatttttaaaatatttattagaacatctgattagaagccactatagagtttctaaacatataacaatagttagatacaaggataccgaagaattaaatctaacgagaatatgttataatagagataagtttaaggcgtttgtattcgcttggtttaacggcgtttcggaaaatgaaaaggtactagatacgtataaaaaggtatctaatttgatataatgaattcagtgactgtatcacacgcgccatatactattacttatcacgatgattgggaaccagtaatgagtcaattggtagagttttataacgaagtagccagttggctgctacgagacgagacgtcgcctattcctgataagttctttatacagttgaaacaaccgcttagaaataaacgagtatgtgtgtgtggtatagatccgtatccgaaagatggaactggtgtaccgttcgaatcaccaaattttacaaaaaaatcaattaaggagatagcttcatctatatctagattaaccggagtaattgattataaaggttataaccttaatataatagacggggttataccctggaattattacttaagttgtaaattaggagaaacaaaaagtcacgcgatttactgggataagatttccaagttactgctgcagcatataactaaacacgttagtgttctttattgtttgggtaaaacagatttctcgaatatacgggccaagttagaatccccggtaactaccatagtcggatatcatccagcggctagagaccgccaattcgagaaagatagatcatttgaaattatcaacgttttactggaattagacaacaaggcacctataaattgggctcaagggtttatttattaatgctttagtgaaattttaacttgtgttctaaatggatgcggctattagaggtaatgatgttatctttgttcttaagactataggtgtcccgtcagcgtgcagacaaaatgaagatccaagatttgtagaagcatttaaatgcgacgagttagaaagatatattgagaataatccagaatgtacactattcgaaagtcttagggatgaggaagcatactctatagtcagaattttcatggatgtagatttagacgcgtgtctagacgaaatagattatttaacggccattcaagattttattatcgaggtgtcaaactgtgtagctagattcgcgtttacagaatgcggcgccattcatgaaaatgtaataaaatccatgagatctaatttttcattgactaagtctacaaatagagataaaacaagttttcatattatctttttagatacgtataccactatggatacattgatagctatgaaacgaacactattagaattaagtagatcatctgaaaatccactaaccagatcgatagacactgccgtatataggagaaaaacaactcttcgggttgtaggtactaggaaaaatccaaattgcgacactattcatgtaatgcaaccaccgcatgataatatagaagattacctattcacttacgtggatatgaacaacaatagttattacttttctctacaacaacgattggaggatttagttcctgataagttatgggaaccagggtttatttcattcgaagacgctataaaaagagtttcaaaaatattcattaattctataataaactttaatgatctcgatgaaaataattttacaacggtaccactggtcatagattacgtaacaccttgtgcattatgtaaaaaacgatcgcataaacatccgcatcaactatcgttggaaaatggtgctattagaatttacaaaactggtaatccacatagttgtaaagttaaaattgttccgttggatggtaataaactgtttaatattgcacaaagaattttagacactaactctgttttattaaccgaacgaggagaccatatagtttggattaataattcatggaaatttaacagcgaagaacccttgataacaaaactaattttgtcaataagacatcaactacctaaggaatattcaagcgaattactctgtccaagaaaacgaaagactgtagaagctaacatacgagacatgttagtagattcagtggagaccgatacctatccggataaacttccgtttaaaaatggtgtattggacctggtagacggaatgttttactctggagatgatgctaaaaaatatacgtgtactgtatcaaccggatttaaatttgacgatacaaagttcgtcgaagacagtccagaaatggaagagttaatgaatatcattaacgatatccaaccattaacggatgaaaataagaaaaatagagagctatatgaaaaaacattatctagttgtttatgcggtgctaccaaaggatgtttaacattcttttttggagaaactgcaactggaaagtcgacaaccaaacgtttgttaaagtctgctatcggtgacctgtttgttgagacgggtcaaacaattttaacagatgtattggataaaggacctaatccatttatcgctaacatgcatttgaaaagatctgtattctgtagcgaactacctgattttgcctgtagtggatcaaagaaaattagatctgacaatattaaaaagttgacagaaccttgtgtcattggaagaccgtgtttctccaataaaattaataatagaaaccatgcgacaatcattatcgatactaattacaaacctgtttttgataggatagataacgcattaatgagaagaattgccgtcgtgcgattcagaacacacttttctcaaccttctggtagagaggctgctgaaaataatgacgcgtacgataaagtcaaactattagacgaggggttagatggtaaaatacaaaataatatatatagatttgcatttctatacttgttggtgaaatggtacaaaaaatatcatgttcctattatgaaactatatcctacacccgaagagattcctgactttgcattctatctcaaaataggtactctgttggtatctagctctgtaaagcatattccattaatgacggacctctccaaaaagggatatatattgtacgataatgtggtcactcttccgttgactactttccaacagaaaatatccaagtattttaattctagactatttggacacgatatagagagcttcatcaatagacataagaaatttgccaatgttagtgatgaatatctgcaatatatattcatagaggatatttcatctccgtaaatatatgctcatatatttatagaagatatcacatatctaaatgaataccggaatcatagatttatttgataatcatgttgatagtataccaactatattacctcatcagttagctactctagattatctagttagaactatcatagatgagaacagaagcgtgttattgttccatattatgggatcaggtaaaacaataatcgctttgttgttcgccttggtagcttccagatttaaaaaggtttacattctagtgccgaacatcaacatcttaaaaattttcaattataatatgggtgtagctatgaacttgtttaatgacgaattcatagctgagaatatctttattcattccacaacaagtttttattctcttaattataacgataacgtcattaattataacggattatctcgctacaataactctatttttatcgttgatgaggcacataatatctttgggaataatactggagaacttatgaccgtgataaaaaataaaaacaagattccttttttactattgtctggatctcccattactaacacacctaatactctgggtcatattatagatttaatgtccgaagagacgatagattttggtgaaattattagtcgtggtaagaaagtaattcagacacttcttaacgaacgcggtgtgaatgtacttaaggatttgcttaaaggaagaatatcatattacgaaatgcctgataaagatctaccaacgataagatatcacggacgtaagtttctagatactagagtagtatattgtcacatgtctaaacttcaagagagagattatatgattactagacgacagctatgttatcatgaaatgtttgataaaaatatgtataacgtgtcaatggcagtattgggacaacttaatctgatgaataatttagatactttatttcaggaacaggataaggaattgtacccaaatctgaaaataaataatggcgtgttatacggagaagaattggtaacgttaaacattagttccaaatttaaatactttattaatcggatacagacactcaacggaaaacattttatatacttttctaattctacatatggcggattggtaattaaatatatcatgctcagtaatggatattctgaatataatggttctcagggaactaatccacatatgataaacggcaaaccaaaaacatttgctatcgttactagtaaaatgaaatcgtctttagaggatctattagatgtgtataattctcctgaaaacgatgatggtagtcaattgatgtttttgttttcatcaaacattatgtccgaatcctatactctaaaagaggtaaggcatatttggtttatgactatcccagatactttttctcaatacaaccaaattcttggacgatctattagaaaattctcttacgccgatatttctgaaccagttaatgtatatcttttagccgccgtatattccgatttcaatgacgaagtgacgtcattaaacgattacacacaggatgaattaattaatgttttaccatttgacatcaaaaagctgttgtatctaaaatttaagacgaaagaaacgaatagaatatactctattcttcaagagatgtctgaaacgtattctcttccaccacatccatcaattgtaaaagttttattgggagaattggtcagacaatttttttataataattctcgtattaagtataacgataccaagttacttaaaatggttacatcagttataaaaaataaagaagacgctaggaattacatagatgatattgtaaacggtcacttctttgtatcgaataaagtatttgataaatctcttttatacaaatacgaaaacgatattattacagtaccgtttagactttcctacgaaccatttgtttggggagttaactttcgtaaagaatataacgtggtatcttctccataaaactgatgagatatataaagaaataaatgtcgagctttgttaccaatggatacctttccgttacattggaaccacacgagctgacgttagacataaaaactaatattaggaatgccgtatataagacgtatctccatagagaaattagtggtaaaatggccaagaaaatagaaattcgtgaagacgtggaattacctctcggcgaaatagttaataattctgtagttataaacgttccgtgtgtaataacctacgcgtattatcacgttggggatatagtcagaggaacattaaacatcgaagatgaatcaaatgtaactattcaatgtggagatttaatctgtaaactaagtagagattcgggtactgtatcatttagcgattcaaagtactgcttttttcgaaatggtaatgcgtatgacaatggcagcgaagtcactgccgttctaatggaggctcaacaaggtatcgaatctagttttgtttttctcgcgaatatcgtcgactcataaaaaagagaatagcggtaagtataaacacgaatactatggcaataattgcgaatgttttattctcttcgatatatttttgataatatgaaaaacatgtctctctcaaatcggacaaccatctcataaaatagttctcgcgcgctggagaggtagttgccgctcgtataatctctccagaataatatacttgcgtgtcgtcgttcaatttatacggatttctatagttctctgttatataatgcggtttgccctcatgattagacgacgacaatagtgttctaaatttagatagttgatcagaatgaatgtttattggcgttggaaaaattatccatacagcgtctgcagagtggttgatagttgttcctagatatgtaaaataatccaacttactaggcagcaaattgtctagataaaatactgaatcaaacggtgcagacgtattggcggatctaatggaatccaattgattaactatcttttgaaaatatacatttttatgatccaatacttgtaagaatatagaaataatgataagtccatcatcgtgtttttttgcctcttcataagaactatattttttcttattccaatgaacaagattaatctctccagagtatttgtacacatctatcaagtgattggatccataatcgtcttcctttccccaatatatatgtagtgatgataacacatattcattggggagaaaccctccacttatatatcctcctttaaaattaatccttactagttttccagtgttctggatagtggttggtttcgactcattataatgtatgtctaacggcttcaatcgcgcgttagaaattgcttttttagtttctatattaataggagatagttgttgcggcatagtaaaaatgaaatgataactgtttaaaaatagctcttagtatgggaattacaatggatgaggaagtgatatttgaaactcctagagaattaatatctattaaacgaataaaagatattccaagatcaaaagacacgcatgtgtttgctgcgtgtataacaagtgacggatatccgttaataggagctagaagaacttcattcgcgttccaggcgatattatctcaacaaaattcagattctatctttagagtatccactaaactattacggtttatgtactacaatgaactaagagaaatctttagacggttgagaaaaggttctatcaacaatatcgatcctcactttgaagagttaatattattgggtggtaaactagataaaaaggaatctattaaagattgtttaagaagagaattaaaagaggaaagtgatgaacgtataacagtaaaagaatttggaaatgtaattctaaaacttacaacacgggataaattatttaataaagtatatataagttattgcatggcgtgttttattaatcaatcgttggaggatttatcgcatactagtatttacaatgtagaaattagaaagattaaatcattaaatgattgtattaacgacgataaatacgaatatctgtcttatatttataatatgctagttaatagtaaatgaacttttacagatctagtataattagtcagattattaagtataatagacgactagctaagtctattatttgcgaggatgactctcaaattattacactcacggcattcgttaaccaatgcctatggtgtcataaacgagtatccgtgtccgctattttattaactactgataacaaaatattagtatgtaacagacgagatagttttctctattctgaaataattagaactagaaacatgtttagaaagaaacgattatttctgaattattccaattatttgaacaaacaggaaagaagtatactatcgtcatttttttctctagatccagctactactgataatgatagaatagacgctatttatccgggtggcatacccaaaaggggtgagaatgttccagagtgtttatccagggaaattaaagaagaagttaatatagacaattcttttgtattcatagacactcggttttttattcatggcatcatagaagataccattattaataaattttttgaggtaatcttctttgtcggaagaatatctctaacgagtgatcaaatcattgatacatttaaaagtaatcatgaaatcaaggatctaatatttttagatccgaattcaggtaatggactccaatacgaaattgcaaaatatgctctagatactgcaaaacttaaatgttacggccatagaggatgttattatgaatcattaaaaaaattaactgaggatgattgattaaaaaatataaattaatttaccatcgtgtatttttataacgggattgtccggcatatcatgtagatagttaccgtctacatcgtatactcgaccatctacgcctttaaatcctctatttattgacattaatctattagaattggaataccaaatattagtaccctcaattagtttattggtaatattttttttagacgatagatcgatggctcttgaaaccaaggttttccaaccggactcattgtcgatcggtgagaagtctttttcattagcatgaatccattctaatgatgtatgtttaaacactctaaacaattggacaaattcttttgatttgctttgaatgatttcaaataggtcttcgtctacagtaggcataccattagataatctagccattataaagtgcacgtttacatatctacgttctggaggagtaagaacgtgactattgagacgaatggctcttcctactatctgacgaagagacgcctcgttccatgtcatatctaaaatgaagatatcattaattgagaaaaaactaataccctcgcctccactagaagagaatacgcatgttttaatgcattctccgttagtgtttgattcttggttaaactcagccaccgccttgattctagtatcttttgttctagatgagaactctatattagagataccaaagactttgaaatatagtaataagatttctattcctgactgattaacaaatggttcaaagactagacatttaccatgggatgctaatattcccaaacatacatctataaatttgacgcttttctcttttaattcagtaaatagagagatatcagccgcactagcatcccctttcaatagttctccctttttaaaggtatctaatgcggatttagaaaactctctatctcttaatgaatttttaaaatcattatatagtgttgctatctcttgcgcgtattcgcccggatcacgattttgtctttcaggaaagctatcgaacgtaaacgtagtagccatacgtctcagaattctaaatgatgatatacctgtttttatttcagcgagtttagccttttgataaatttcttcttgctttttcgacatattaacgtatcgcattaatactgttttcttagcgaatgatgcagacccttctacgtcatcaaaaatagaaaactcgttattaactatatacgaacatagtcctcctagtttggagactaattctttttcatcgactagacgtttattctcaaatagcgattggtgttgtaaggatcctggtcgtagtaagttaaccaacatggtgaattcttgcacactattgacgataggtgtagccgataaacaaatcatcttatggttttttaacgcaatggtcttagataaaaaattatatactgaacgagtaggacggatcttaccatcttctttgattaatgatttagaaatgaagttatgacattcatcaataatgacgcatattctactcttggaattaatagttttgatattagtaaaaaatttatttctaaaattttgatcatcgtaattaataaaaatacaatccttcgttatctctggagcgtatctgagtatagtgttcatccaaggatcttctatcaaagcctttttcaccaataagataatagcccaattcgtataaatatccttaagatgtttgagaatatatacagtagtcattgttttaccgacacccgtttcatggaacaataaaagagaatgcatactgtctaatcctaagaaaactcttgctacaaaatgttgataatccttgaggcgtactacgtccgaccccatcatttcaacgggcatattagtagttctgcgtaaggcataatcgatataggccgcgtgtgatttactcatttatgagtgataagtaataactatgttttaaaaatcacagcagtagtttaactagtcttctctgatgtttgttttcgatactttttgaatcagaagtcatactagaataaagcaacgagtgaacgtaatagagagcttcgtatactctattcgaaaactctaagaacttattaatgaattccgtatccactggattgtttaaaatactaaattgaacactgttcacatccttccaagaagaagacttagtgacggacttaacatgagacataaataaatccaaattttttttacaaacatcactagccaccataatggcgctatctttcaaccagctatcgcttacgcattttagcagtctaacatttttaaagagactacaatatattctcatagtatcgattacacctctaccgaataaagttggaagtttaataatacaatatttttcgtttacaaaatcaaataatggtcgaaacacgtcgaaggttaacatcttataatcgctaatgtatagattgttttcagtgagatgattattagatttaatagcatctcgttcacgtttgaacagtttattgcgtgcgctgaggtcggcaactacggcgtccgctttagtactcctcccataatactttacgctattaatctttaaaatttcatagactttatctagatcgctttctggtaacatgatatcatgtgtaaaaagttttaacatgtcggtcggcattctatttagatcattaactctagaaatctgaagaaagtaattagctccgtattccagactaggtaatgggcttttacctagagacagattaagttctggcaatgtttcataaaatggaagaaggacatgcgttccctcccggatattttttacaatttcatccatttacaactctatagtttgttttcattattattagttattatctcccataatcttggtaatacttaccccttgatcgtaagataccttatacaggtcattacatacaactaccaattgtttttgtacataatagattggatggttgacatccatggtggaataaactactcgaacagatagtttatctttccccctagatacattagccgtaatagttgtcggcctaaagaatatctttggtgtaaagttaaaagttagggttcttgttccattattgctttttgtcagtagttcattataaattctcgagatgggtccgttctctgaatatagaacatcatttccaaatctaacttctagtctagaaataatatcggtcttattcttaaaatctattcccttgatgaagggatcgttaatgaacaaatccttggcctttgattcggctgatctattatctccgttatagacgttacgttgactagtccaaagacttacaggaatagatgtatcgatgatgttgatactatgtgatatgtgagcaaagattgttctcttagtggcatcactatatgttccagtaatggcggaaaactttttagaaatgttatatataaaagaattttttcgtgttccaaacattagcagattagtatgaagataaacactcatattatcaggaacattatcaatttttacatacacatcagcatcttgaatagaaacgataccatcttctggaacctctacgatctcggcagactccggataaccagtcggtgggccatcgctaacaataactagatcatccaacaatctactcacatatgcatctatataatctttttcatcttgtgagtaccctggatacgaaataaatttattatccgtatttccataataaggtttagtataaacagagagagatgttgccgcatgaacttcagttacagtcgccgttggttggtttatttgacctattactctcctaggtttctctataaacgatggtttaatttgtacattcttaaccatatatccaataaagctcaattcaggaacataaacaaattctttgttgaacgtttcaaagtcgaacgaagagtcacgaataacgatatcggatactggattgaaggttaccgttacggtaatttttgaatcggatagtttaagactgctgaatgtatcttccacatcaaacggagttttaatataaacgtatactgtagatggttctttaatagtgtcattaggagttaggccaatagaaatatcattaagttcactagaatatccagagtgtttcaaagcaattgtattattgatacaattattatataattcttcgccctcaatttcccaaataacaccgttacacgaagagatagatacgtgattaatacatttatatccaacatatggtacgtaactgaatcttcccatacctttaacttctggaagttccaaactcagaaccaaatgattaagcgcagtaatatactgatccctaatttcgaagctagcgatagcctgattgtctggaccatcgtttgtcataactccggatagagaaatatattgcggcatatacaaagttggaatttgactatcgactgcgaagacattagaccgtttaatagagtcatccccaccgatcaaagaattaatgatagtattattcattttctatttaaaatggaaaaagcttacaataaactccgtagagaaatatctataatttgtgagttttccttaaagtaacagcttccgtaaacgccgtctttatctcttagtaggtttattgtatttatgaccttttccttatcttcatagaatactaaaggcaacaaagaaatttttggttcttctctaagagctacgtgagacttaaccatagaagccaacgaatccctacatattttagaacagaaataccctacttcaccacccttgtatgtctcaatactaataggtctaaaaaccaaatcttgattacaaaaccaacacttatcaattacactatttgtcttaatagacacatctgccatagatttataatactttggtagtatacaagcgagtgcttcttctttagcgggcttaaagactgctttaggtgctgaaataaccacatctggaaggcttactcgcttagccatttaattacggaactatttttttatacttctaatgagcaagtagaaaacctctcatctacaaaaacgtactcgtgtccataatcctctaccatagttacacgttttttagatctcatatgtgctaaaaagttttcccatactaattggttactattatttttcgtataatttttaacagtttgaggttttagatttttagttacagaagtgatatcgaatattttatccaaaaagaatgaataattaattgtcttagaaggagtgttttcttggcaaaagaataccaagtgcttaaatatttctactacttcattaatcttttctgtactcagattcagtttctcatcttttacttgattgattatttcaaagactaacttataatcctttttatttattctctcgttagccttaagaaaactagatacaaaatttgcatctacatcatccgtggatatttgatttttttccatgatatccaagagttccgagataatttctccagaacattgatgagacaataatctccgcaatacatttctcaaatgaataagtttattagacacgtggaagtttgactttttttgtacctttgtacatttttgaaataccgactcgcaaaaaatacaatattcatatccttgttcagatactataccgttatgtctacaaccgctacataatcgtagattcatgttaacactctacgtatctcgtcgtccaatattttatataaaaacattttatttctagacgttgccagaaaatcctgtaatatttttagttttttgggctgtgaataaagtatcgccctaatattgttaccgtcttccgccaatatagtagttaaattatccgcacatgcagaagaacaccgcttaggcggattcagtacaatgttatatttttcgtaccaactcatttaaatatcataatctaaaatagttctgtaatatgtctagcgctaatatattgatcataatcctgtgcataaattaagatacaacaatgtctcgaaatcatcgacatggcttcttccatagttagaagatcgtcgtcaaagttagcaacgtgattcatcaacatttgctgttttgaggcagcaaatactgaaccgtcgccattcaaccattcataaaaaccatcgtctgaatccattgataatttcttgtactggtttttgagagctcgcatcaatctagcatttctagctcccggattgaaaacagaaagaggatcgtacatccagggtccattttctgtaaatagaatcgtataatgtcccttcaagaagatatcagacgatccacaatcaaagaattggtctccgagtttgtaacaaactgcggactttaacctatacatgataccgtttagcataatttctggtgatacgtcaatcggagtatcatctattagagatctaaagccggtgtaacattctccaccaaacatattcttattctgacgtcgttctacataaaacatcattgctccattaacgataacaggggaatgaacagcactacccatcacattagttcccaatggatcaatgtgtgtaactccagaacatcttccatagcctatgttaggaggagcgaacaccactcttccactattgccatcgaatgccatagaataaatatccttggaattgatagaaatcggactgtcggatgttgtgatcatcttcataggattaacaactatgtatggtgccgcctgaagtttcatatcgtaactgatgccgtttataggtctagccacagaaaccaacgtaggtctaaatccaactatagacaaaatagaagccaatatctgttcctcatctgtcataacttgagagcatccagtatgaataatcttcattagatggggatctaccgcatcatcatcgttacaataaaaaattcccattctaatgttcataattgcttttctaatcatggtatgcatgtttgctctctgaatctctgtggaaattagatctgatacacctgtaatcactatcggattatcctccgtaagacgattaaccaacaacatataattataagactttacttttctaaattcataaagttgctggattaggctataggtgtctccatgtacatacgcgttctcgagcgcaggaagtttaataccgaatagtgccatcagaataggatgaatatagtaattagtttctggttttctataaataaaagacaaatcttgtgaactagacatatcggtaaaatgcatggattggaatcgtgtagtcgacagaagaatatgatgattagatggagagtatattttatctaactctttgagttggtcaccgattctaggactagctcgagaatgaataagtactaaaggatgagtacatttcacagaaacactagcattgttcaatgtgctctttacatgggtaaggagttgaaatagctcgtttctatttgttctgacaatatttagtttattcataatgttaagcatatcctgaatagtaaagttagatgtgtcatacttgttagtagttagatatttagcaattgcattcccatcatttctcaatctcgtactccaatcatgcgtggatgctacttcgtcgatggaaaccatacaatcctttttgataggctgttgagattgatcatttcctgcacgtttaggtttggtacgttgatttctagcccctgcggatataaagtcatcgtctacaatttgggacaatgaattgcatacactacaagacaaagatttatcagaagtgtgaatatgatcttcatctaccaaagaaagagtttgattagtataactagattttagtcctgcgttagatgttaaaaaaacatcgctattgaccacggcttccattatttatattcgtagtttttactcgaaagcgtgattttaatatccaatcttattacttttggaatcgttcaaaacctttgactagttgtagaatttgatctattgccctacgcgtatactcccttgcatcatatacgttcgtcaccagatcgtttgtttcggcctgaagttggtgcatatctctttcaacattcgacatgagatccttaagggccatatcgtctagattttgttgagatgctgctcctggatttggattttgttgtgctgttgtacatactgtaccaccagtaggtgtaggagtacatacagtggccacaataggaggttgagaaagtgtaaccgttggagtagtacaagaaatacttccatccgattgttgtgtacatgtagttgttggtaacgtctgagaaggttgggtagatggcggcgtcgtcgttttttgatctttattaaatttagagataatatcctgaacagcattgctcggcgtcaacgctggaaggagtgaactcgccggcgcatcagtatcttcagacagccaatcaaaaagattagacatatcagatgatgtattagtttgttgtcgtggttttggtgtaggagcagtactactaggtagaagaataggagccgatgtagctgttggaaccggctgtggagttatatgaatagttggttgtagcggttggataggctgtctgctggcggccatcatattatctctagctagttgttctcgcaactgtctttgataatacgactcttgagactttagtcctatttcaatcgcttcatcctttttcgtatccggatccttttcttcagaataatagattgacgactttggtgtagaggattctgccagcctctgtgagaacttgttaaagaagtccatttaaggctttaaaattgaattgcgattataagattaaatggcagacacagacgatattatcgactatgaatccgatgatctcaccgaatacgaggatgatgaagaagaggaagaagatggagagtcactagaaactagtgatatagatcccaaatcttcttataagattgtagaatcagcatccactcatatagaagatgcgcattccaatcttaaacatatagggaatcatatatctgctcttaaacgacgctatactagacgtataagtctatttgaaatagcgggtataatagcagaaagctataacttgcttcaacgaggaagattacctctagtttcagaattttctgacgaaacgatgaagcaaaatatgctacatgtaattatacaagagatagaggagggttcttgtcctatagtcatcgaaaagaacggagaattgttgtcggtaaacgattttgacaaagatggtctaaaattccatctagactatattatcaaaatttggaaacttcaaaaacgatattagaatttatacgaatatcgttctctaaatgtcacaatcaagtctcgcatgttcagcaatttattgtcgtactttatatcgtgttcattaacgatatcttgcaaaatagtaatgattctatcttccttcgatagatattcttcagagattattgtcttatattctttcttgttatcagatatgaatttgataagactttgaacattattgatacccgtctgtttaattttttctacagatattttagttttggcagattctatcgtatctgtcaatagacatccaacatcgacattcgacgtcaattgtctataaatcaacgtataaattttagaaataacattagcgaattgttgtgcgttgatgtcgttattctgaaacagtatgattttaggtagcattttcttaacaaagagaacgtatttattgttactcagttgaacagatgatatatccagattactaacgcatctgattccgtataccaaactttcagaagaaatggtatacaattgtttgtattcattcaatgtctctttttcagaaattagtttagagtcgaatactgcaataattttcaagagatagttttcatcagataagattttatttagtgtagatatgataaaactattgttttgttggagaacttgatacgccgcgttctctgtagtcgacgctctcaaatgggaaacaatctccattatttttttggaatcggatactatatcttcggtatcttgacgcagtctagtatacatagagttaagagagattagagtttgtacattaagcaacatgtctctaaatgtggctacaaacttttcctttttcacatcatctagtttattatataccgatttcacaacggcaccagatttaaggaaccagaatgaaaaactctgataactacaatatttcatcatagttacgattttatcatcttctatagttggtgtaatagcgcatacctttttctccaagactggaaccaacgtcataaaaatgtttaaatcaaaatccatatcaacatctgatgcgctaagaccagtctcgcgttcaagattatctttactaatggtgacgaactcatcgtataaaactctaagtttgtccattatttatttacagatttagttgtttaatttatttgtgctcttccagagttgggatagtatttttctaacgtcggtattatattattaggatctacgttcatatgtatcataatattaatcatccacgttttgataaatctatctttagcttctgaaataacgtatttaaacaaaggagaaaaatatttagctacggcatcagacgcaataacattttttgtaaatgtaacgtatttagacgacagatcttcgttaaaaagttttccatctatgtagaatccatcggttgttaacaccattcccgcgtcagattgaataggagtttgaatagtttgttttggaaatagatccttcaataacttatagttgggtgggaaaaaatcgattttatcactagactctttcttttttactatcattacctcatgaactatttcttgaatgagtatatgtattttctttcctatatcggacgcgttcattggaaaatataccatgtcgttaactataagaatatttttatcctcgtttacaaactgaataatatcagatgtagttcgtaaacgaactatatcatcaccagcacaacatctaactatatgatatccactagtttcctttagccgtttattatcttgttccatattagcagtcattccatcatttaagaaggcgtcaaaaataatagggagaaatgacattttggattctgttacaactttaccaaaattaaggatatacggacttactatctttttctcaacgtcaatttgatgaacacacgatgaaaatgtgcttctatgagattgatcatgtagaaaacaacaagggatacaatatttccgcatatcatgaaatatattaagaaatcccaccttattatatttccccaaaggatccatgcacgtaaacattatgccgttatcattaataaagacttctttctcatcggatctgtaaaagttgttactgatttttttcattccaggatctagataattaataatgatgggttttctattcttattctttgtattttggcatatcctagaccagtaaacagtttccactttggtaaaatcagcagacttttgaacgctattaaacatggcattaatggcaataactaaaaatgtaaaatatttttctatgttaggaatatggtttttcactttaatagatatatggtttttggccaaaatgatagatatttttttatccgaggatagtaaaatattattagtcgccgtctctataaaaatgaagctagtctcgatatccaattttattctagaattgataggagtcgccaaatgtaccttatacgttatatctcccttgatgcgttccatttgtgtatctatatcggacacaagatctgtaaatagttttacgttattaatcatcacggtatcgccgtcgctagataacgctaatgtaccatccaagtcccaaatggagagatttaactgttcatcgtttagaataaaatgattaccggtcatattaataaagtgttcatcgtatctagataacaacgacttataattaatgtccaagtcttgaactcgctgaatgatcttttttaacccagttagttttagattggtacgaaatatattgttaaactttgattctacagtaatgtccaaatctagttgtggaaatacttccatcaacattgtttcaaacttgataatattattatctacatcttcgtacgatccaaattccggaatagatgtatcgcacgctctggccacccagataaccaaaaagtcacacgctccaggatatacattgtataaaaagctatcgttttttagtagggtttttttctgcgtgtatacgaagggattaaaaatagtattatcaacgtaactatattccaaattattcttatgagaatagataataatatcgtccttaatatctaacaaatttcctaaatatccctttaattgagtcattcgaagcgtcaatagaatatgtctcttaactatttccggctgttgtatatttaaatgacttcgtaaaaaataatatatgggcgacttctcatctatgtaatcatatggagtgagatatagggctcgttctacctcctgccccttacccacctgtaataccaattgcggacttactatatatcgcatatttatatcgtggggtaaagtgaaaatctactaccgatgatgtaagtcttacaatgttcgaaccagtaccagatcttaatttggaggcctccgtagaactaggggaggtaaatatagatcaaacaacacctatgataaaggagaatagcggttttatatcccgcagtagacgtctattcgcccatagatctaaggatgatgagagaaaactagcactacgattctttttacaaagactttattttttagatcatagagagattcattatttgttcagatgcgttgacgctgtaaaagacgtcactattaccaaaaaaaataacattatcgtggcgccttatatagcacttttaactatcgcatcaaaaggatgcaaacttacagaaacaatgattgaagcattctttccagaactatataatgaacatagtaagaaatttaaattcaactctcaagtatccatcatccaagaaaaactcggataccagtttggaaactatcacgtttatgattttgaaccgtattactctacagtagctctggctattcgagatgaacattcatctggcatttttaatatccgtcaagagagttatctggtaagttcattatctgaaataacatatagattttatctaattaatctaaaatctgatcttgttcaatggagtgctagtacgggcgctgtaattaatcaaatggtaaatactgtattgattacagtgtatgaaaagttacaactggtcatagaaaatgattcacaatttacatgttcattggctgtggaatcaaaacttccaataaaattacttaaagatagaaatgaattatttacaaaattcattaacgagttaaaaaagaccagttcattcaagataagcaaacgcgataaggatacgctactaaaatattttacttaggactggagttagaatttatagacgactcatttcgtttatcattgttactattattactattactatcattattagtgttggcattattagtattcttcttgtcatcttgttcagaaatatacagcaatgctatacctaatactaaatacattatcatgctcgcaatggctctaacaacaacgaaccaaaatgaatttggtcgtagcttttgttcacaaaaatacataaagaaatgtctacataaatctatggcgccattggctacttgaaatagcgccagtcctcctacagattttaatatagctgtataacatgacatttattcatcatcaaaagagacagagtcaccatctgtcatatttagattttttttcatgtgttcaaagtatcctctactcatttcattataatagtttatcatacttagaattttaggacggatcaatgagtaagacttgactagatcgtcagtagtaatttgtgcatcgtctattctgcatccgcttcgtcgaataatgtatagcatcgctttgagattctccatagctatcaagtctttatacaatgacatggaaatatctgtgaatactttatacttctccaacatcgatgccttaacatcatcgcctactttagcattgaaaatacgttctattgtgtagatggatgtagcaagatttttaaacaacaatgccatcttacacgatgattgcctcaagtctccaatcgtttgtttagaacgattagctacagagtccaatgcttggctgactagcatattattatctttagaaattgtattcttcaatgaggcgtttatcatatctgtgatttcgttagtcatattacagtctgactgggttgtaatgttatccaacatatcacctatggatacggtacacgtaccagcatttgtaataatcctatctaagatgttgtatggcattgcgcagaaaatatcttctcctgtaatatctccactctcgataaatctactcagattattcttaaatgccttattctctggagaaaagatatcagtgtccatcatttcattaatagtatacgcagaaaagataccacgagtatcaattctatccaagatacttatcggttccgagtcacagataatggtttcctctccttcgggagatcctgcatagaaatatctaggacaatagtttctatactgtctgtaactctgataatctctaaagtcactaactgataccatgaaattgagaagatcaaacgctgaagtaattaatttttctgcctcgtttttactacaactagttttcatcaatgtagtgacgatgtattgtttagttacttttggtctaatactgatgatagagatattattgcttcccataatggatcttctagtagtcaccttaaagcccattgatgcgaatagcagatagataaagtcttggtatgactcctttctaatatagtacggactacctttgtcacccaactttatacccacataagccataacaacctctttaatagccgtttcatgaggtttatcagccatgagcctgagtagttggaagaatctcatgaatcccgtctcagaaagtcctatatgcatgatagatttatctttcctgggaaactctcgtatagtcatagatgaaatactctttaaagtttctgaaataagattagtaacagtcttacctccgactactctaggtaacaaacaaactctaataggtgttttctctgcggagataatatcagaaaggatagagcaataagtagtattattgtgattataaagaccgaatacataacaggtagaatttataaacatcatgtcctgaaggtttttagacttgtattcctcgtaatccataccgtcccaaaacatggatttggtaactttgatagccgtagatctttgttccttcgccaacaggttaaagaaattaataaagaatttgttgtttctatttatgtccacaaattgcacgtttggaagcgccacggttacattcactgcagcattttgaggatcgcgagtatgaagtacgatgttattgtttactggtatatctggaaagaaatctaccagtctaggaataagagattgatatcgcatagaaatagtaaagtttataatctcatcatcgaagagcattttgttaccattgtaataaatatccactctgtcatatgtataaatgaagtactgttcaaacatgatgagatgtttatatgttggcatagtagtgagatcgacgtttggtaatggcaatgtattaagattaactccataatgtctagcagcatctgcgatgttataagcgtcgtcaaagcggggtcgatcttgtattgttatatattgtctaacacctataagattatcaaaatcttgtctgcttaatacaccgttaacaatttttgccttgaattcttttattggtgcattaataacatccttatagaggatgttaaacaaataagtgttatcaaagttaagatctggatatttcttttctgctagaacatccattgagtcggagccatctggtttaatataaccaccgataaatctagctctgtattctgtatccgtcaatctaatattaagaaggtgttgagtgaaaggtggaagatcgtaaaagctgtgagtattaatgataggattagtttccgaactaatgttaattggggtattaataatatctatatttccagcgttaagtgtaacattaaacagttttaattcacgtgacgtggtatcaattaaataattaatgcccaatttggatatagcagcctgaagctcatcttgtttagttacggatcctaatgagttattaagcaatatatcgaacggatgaacgaaggttgttttaagttggtcacatactttgtaatctagacatagatgcggaagaacggtagaaactatacgaaataaatattcagagtcctctaattgatcaagagtaactattgacttaataggcatcatttatttagtattaaatgacgaccgtaccagtgacggatatacaaaacgatttaattacagagttttcagaagataattatccatctaacaaaaattatgaaataactcttcgtcaaatgtctattctaactcacgttaacaacgtggtagatagagaacataatgccgccgtagtgtcatctccagaggaaatatcctcacaacttaatgaagatctatttccagatgatgattcaccggccactattatcgaacgagtacaacctcatactactattattgacgatactccacctcctacgtttcgtagagagttattaatatcggaacaacgtcaacaacgagaaaaaagatttaatattacagtatcgaaaaatgctgaagcaataatggaatctagatctatgataacttctatgccaacacaaacaccatccttgggagtagtttatgataaagataaaagaattcagatgttagaggatgaagtggttaatcttagaaatcaacgatctaatacaaaatcatctgataatttagataattttaccaaaatactatttggtaagactccgtacaaatcaacagaagttaataagcgtatagccatcgttaattatgcaaatttgaacgggtcccccttatcagtcgaggacttggatgtttgttcggaggatgaaatagatagaatctataaaacgattaaacaatatcacgaaagtagaaaacgaaaaattatcgtcactaacgtgattattattgtcataaacattatcgagcaggcattgctaaaactcggatttgaagaaatcaaaggactgagtaccgatatcacttcagaaattatcgatgtggagatcggagatgactgcgatgctgtagcatctaaactaggaatcggtaacagtccggttcttaatattgtattgtttatactcaagatattcgttaaacgaattaaaattatttaatttaatacattcccatatccagacaacaatcgtctggattaatctgttcctgtcgtctcataccggacgacatattaatctttttattagtgggcatctttttagatggtttctttttcccagcattaactgagtcgatacctagaagatcgtgattgatctctccgaccattccacgaacttctaattggccgtctctgacggtaccataaactattttaccagcattagtaacagcttggacaatctgaccatccatcgcattgtacgatgtagtagtaactgttgttctacgtctaggagcaccagaagtatttttggagcccttggatgttgatgtagaagaagacgaggattttgattttggtttacatgtaatacattttgaactctttgattttgtatcacatgcgccggcagtcacatctgtttgagaattaagattattgttgcctcctttgacggctgcatctccaccgatttgcgctagtagatttttaagctgtggtgtaatcttattaactgtttcgatataatcatcgtaactgcttctaacggctaaattttttttatccgccatttagaagctaaaaatatttttatttatgcagaagatttaactagattatacaatgaactaatatgatccttttccagattatttacaaacttggtattttttggttctggaggaggcgaatttaaattcggacttggattcggattttgtaagttcttgatcttattatacatcgagtataggatggcgacagtaactgctacacaaataccgatcaaaagaagaataccaatcatttattgacaataacttcactattgatcaagtatgcaatatatcatcttttcactaaataagtagtaataatgattcaacaatgtcgagatatatggacgataataatttagttcatggaaatatcgctatgattggtgtgaatgactccgctaactctgtggggtgcgcagtgctttccccacatagaataaattagcattccgactgtgataataataccaagtataaacgccataatactcaatactttccatgtacgagtgggactggtagacttactaaagtcaataaaggcgaagatacacgaaagaatcaaaagaatgattccagcgattagcacgccggaaaaataatttccaatcataagcatcatgtccatttaactaataaaaattttaaatcgccgaatgaacaaagtggaatataaaccatataaaaacaatagtttgtactgcaaaaataatatctatttttgttttcgaagatatggtaaaattaaatagtagtacacagcatgttataactaacagcagcaacggctcgtaattacttatcatttactagacgaaaaggtggtgggatattttcttgctcaaataatacgaatatatcacccatccattttatgcgatgtttatatactctaatctttaatagatctatagacgacgggtttaccaacaatatagattttatcgattcatctaatttaaacccttccttaaacgtgaatgatctattatctggcataacgatgaccctacctgatgaatcggacaatgtactgggccatgtagaataaattatcaacgaattatcgtctacgaacatttatatcatttgttttaattttaggacgcgaataaatggatataaaatagaaaataacagatattacaaccagtgttatggccgcgcccaaccaggtaggcagttttattttatcttttactacaggttctcctggatgtacgtcaccaacggcggacgtagttctagtacaattagacgtaagttccgcttgggaattttttaacgctaaagagttaacgttaatcgtgcacccaacgtatttacatctagttcgttgaacatcttgattataatataaccattttctatctctagattcgtcagtgcactcatgtaaccaacataccctaggtcctaaatatttatctccggaattagattttggataattcgcgcaccaacaatttctatttcctttatgatcgttacaaaagacgtataatgccgtatccccaaaagtaaaataatcaggacgaataattctaataaactcagaacaatatctcgcatccatatgtttggagcaaatatcggaataagtagacatagccggtttccgttttgcacgtaaccattctaaacaattggggtttccaggatcgtttctacaaaatccagtcatgaaatcgtcacaatgttctgtcttgtaattattattaaatatttttggacagtgtttggtatttgtcttagaacaacattttgccacgctatcactatcgcccaggagataatccttttttataaaatgacatcgttgcccggatgctatataatcagtagcgtgttttaaatccttaatatattcaggagttacctcgttctgataatagattaatgatccaggacgaaatttgaaagaactacatggttctccatgaattaatacatattgtttagcaaattcaggaactataaaactactacaatgatctatcgacataccatctatcaaacaaaacttgggtttaatttctcccggagatgtttcataatagtacgtataactttcttctgcaaacttaacagctctattatattcaggataattaaaacctaattccatatatttgtctcgtatatctgctattcctggtgctattttgattctattaagagtaacagctgcccccattcttaataatcgtcagtatttaaactgttaaatgttggtatatcaacatctaccttatttcccgcagtataaggtttgttgcaggtatactgttcaggaatggttacatttatacttcttctatagtcctgtctttcgatgttcatcacatatgcaaagaacagaataaacaaaataatgtaagaaataatattaaatatctgtgaattcgtaaatacattgattgccataataattacagcagctacaatacacacaatagacattcccacagtgttgccattacctccacgatacatttgagttactaagcaataggtaataactaagctagtaagaggcaatagaaaagatgagataaatatcatcaatatagagattagaggagggctatatagagccaagacgaacaaaatcaaaccgagtaacgttctaacatcattatttttgaagattcccaaataatcattcattcctccataatcgttttgcatcatacctccatctttaggcataaacgattgctgctgttcctctgtaaataaatctttatcaagcactccagcacccgcagagaagtcgtcaagcatattgtaatatcttaaataactcatttatatattaaaaaatgtcactattaaagatggagtataatctttatgccgaactaaaaaaaatgacttgtggtcaacccctaagtctttttaacgaagacggggatttcgtagaagttgaaccgggatcatcctttaagtttctgatacctaagggattttacgcctctccttccgtaaagacgagtctagtattcgagacattaacaacgaccgataataaaatcactagtatcaatccaacaaatgcgccaaagttatatcctcttcaacgcaaagtcgtatctgaagtagtttctaatatgaggaaaatgatcgaatcaaaacgtcctctatacatcactcttcacttggcgtgtggatttggtaagactattaccacgtgttatcttatggctacacacggtagaaaaaccgtcatttgcgtacccaataaaatgttaatacatcaatggaagacacaggtagaggcagtcggattggaacataagatatccatagatggagtaagtagtctattaaaggaactaaagactcaaagtccggatgtattaatagtagtcagtagacatctgacaaacgatgccttttgtaaatatatcaataagcattatgatttgttcatcttggatgaatcacatacgtataatctgatgaacaatacagcagttacaagatttttagcgtattatcctccgatgatgtgttattttttaactgctacacctagaccatctaaccgaatttattgtaacagtattattaatattgccaagttatccaatctaaaaaaaactatctatgcagtagatagtttttttgagccatattccacagataatattagacatatggtaaaacgactagatggaccatctaataaatatcatatatataccgagaagttattatctgtagacgagcctagaaatcaacttattcttgataccctggtagaagaattcaagtcaggaactattaatcgcattttagttattactaaactacgtgaacatatggtattattctacaaacgattattagattttttcggaccagaggttgtatttataggagacgcccaaaatagacgtactccagatatggtcaaatcaatcaaggaactaaatagatttatattcgtatccaccttattttattccggtactggtttagatattcctagtttggattcgttgttcatttgctcggcagtaatcaacaatatgcaaatagagcaattactagggagggtatgtcgagaaacagaactattagataggacggtatatgtatttcctaacacatccatcaaagaaataaagtacatgataggaaatttcatgcaacgaattattagtctgtctgtagataaactaggatttaaacaaaaaagttatcggaaacatcaagaatccgatcccacttctgcatgtacaacatcatccagagaagaacgtgtattaaatagaatatttaactcgcaaaatcgttaagaagtttaagcgacgatccgcatgctgcgcaggccagtgtattacccctcatagtattaatataatccaatgatacttttgtgatgtcggaaatcttaaccaatttagactgacaggcagaacacgtcatgcaatcatcatcgtcatcgataactgtagtcttgggcttctttttgcgactcttcattccggaacgcacattggtgctatccatttaggtagtaaaaaataagtcagaatatgccctataacacgatcgtgcaaaacctggtatatcgtctctatctttatcacaatatagtgtatcgacatttttattattattgacctcgtttatcttggaacatggaatgggaacatttttgttatcaacggccatctttgccttaattccagatgttgtaaaattataactaaacagtctatcatcgacacaaatgaaattcttgtttagacgtttgtagtttacgtatgcggctcgttcgcgtctcattttttcagatattgcaggtactataatattaaaaataagaatgaaataacataggattaaaaataaagttatcatgacttctagcgctgatttaactaacttaaaagaattacttagtctgtacaaaagtttgagattttcagattctgcggctatagaaaagtataattctttggtagaatggggaacatctacttactggaaaataggcgtgcaaaaggtagctaatgtcgagacgtcaatatctgattattatgatgaggtaaaaaataaaccgtttaatattgatccgggctattacattttcttaccggtatattttgggagcgtctttatttattcgaagggtaaaaatatggtagaacttggatctggaaactcttttcaaataccagatgatatgcgaagtgcgtgtaacaaagtattagacagcgataacggaatagactttctgagatttgttttgttaaacaatagatggataatggaagatgctatatcaaaatatcagtctccagttaatatatttaaactagctagtgagtacggattaaacatacccaaatatttagaaattgaaatagaggaagacacattatttgacgacgagttatactctattatagaacgctctttcgatgataaatttccaaaaatatccatatcgtatattaagttgggagaacttagacggcaagttgtagactttttcaaattctcattcatgtatattgagtccatcaaggtagatcgtataggagataatatttttattcctagcgttataacaaaatcaggaaaaaagatattagtaaaagatgtagaccatttaatacgatccaaggttagagaacatacatttgtaaaagtaaaaaagaaaaacacattttccattttatacgactatgatggaaacggaacagaaactagaggagaagtaataaaacgaattatagacactataggacgagactattatgttaacggaaagtatttctctaaggttggtagtgcaggcttaaagcaattgactaataaattagatattaatgagtgcgcaactgtcgatgagttagttgatgagattaataaatccggaactgtaaaacgaaaaataaaaaaccaatcagcatttgatttaagcagagaatgtttgggatatccagaagcggattttataacgttagttaataacatgcggttcaaaatagaaaattgtaaggttgtaaatttcaatattgaaaatactaattgtttaaataacccgagtattgaaactatatatggaaactttaaccagttcgtctcaatctttaatgtcgtcaccgatgtcaaaaaaagattattcgagtgaaataatatgcgcctttgatataggtgcaaaaaatcctgccagaactgttttagaagtcaaggataactccgttagggtattggatatatcaaaattagactggagttctgattgggaaaggcgcatagctaaagatttgtcacaatatgaatacactacagttcttctagaacgtcagcctagaaggtcgccgtatgttaaatttatctattttattaaaggctttttatatcatacatcggctgccaaagttatttgcgtctcgcctgtcatgtctggtaattcatatagagatcgaaaaaagagatcggtcgaagcatttcttgattggatggacacattcggattgcgagactccgttccggatagacgcaaattagacgatgtagcggatagtttcaatttggctatgagatacgtattagataaatggaatactaattatacaccttataataggtgtaaatctagaaattacataaaaaaaatgtaataacgttagtaacgccattatggataatctatttacctttctacatgaaatagaagatagatatgccagaactatttttaactttcatctaataagttgcgatgaaataggagatatatatggtcttatgaaagaacgcatttcctcagaggatatgtttgataatatagtgtataataaagatatacatcctgccattaagaaactagtgtattgcgacatccaacttactaaacacattattaatcagaatacgtatccggtatttaacgattcttcacaagtgaaatgttgtcattatttcgacataaactcagataatagcaatattagctctcgtacagtagagatatttgagagggaaaagtcatctcttgtatcatatattaaaactaccaataagaagagaaaggtcaattacggcgaaataaagaaaactgttcatggaggcactaatgcaaattacttttccggtaaaaagtctgacgagtatctgagtactacagttagatccaacattaatcaaccttggatcaaaaccatctctaagaggatgagagttgatatcattaatcactctatagtaacgcgtggaaaaagctctatattacaaactatagaaattatttttactaatagaacatgtgtgaaaatattcaaggattctactatgcacattattctatccaaggacaaggatgaaaaggggtgtatacacatgattgacaaattattctatgtctattataatttatttctgttgttcgaagatatcatccaaaacgagtactttaaagaagtagctaatgttgtaaaccacgtactcacggctacggcattagatgagaaattattcctaattaagaaaatggctgaacacgatgtttatggagttagcaatttcaaaatagggatgtttaacctgacatttattaagtcgttggatcataccgttttcccctctctgttagatgaggatagcaaaataaagttttttaaggggaaaaagctcaatattgtagcattacgatctctggaggattgtataaattacgtgactaaatccgagaatatgatagaaatgatgaaggaaagatcgactattttaaatagcatagatatagaaacggaatcggtagatcgtctaaaagaattgcttctaaaatgaaaaaaaacactaattcagaaatggatcaacgactagggtataagtttttggtgcctgatcctaaagccggagttttttatagaccgttacatttccaatatgtatcgtattctaattttatattgcatcgattgcatgaaatcttgaccgtcaagcggccactcttatcgtttaagaataatacagaacgaattatgatagaaattagcaatgttaaagtgactcctccagattactcacctataatcgcgagtattaaaggtaagagttatgacgcattagccacgttcactgtaaatatctttaaagaggtaatgaccaaagagggtatatccatcactaaaataagtagttatgagggaaaagattctcatttgataaaaattccgctactaataggatacgggaataaaaatccacttgatacagccaagtatcttgttcctaatgtcataggtggagtctttatcaataaacaatctgtcgaaaaagtaggaattaatctagtagaaaagattacaacatggccaaaatttagggttgttaagccaaactcattcactttctcgttttcctccgtatcccctcctaatgtattaccgacaagatatcgccattacaagatatctctggatatatcacaattggaagcgttgaatatatcatcgacaaagacatttataacggtcaatattgttttgctgtctcaatatttatctagagtgagtctagaattcattagacgtagtttatcatacgatatgcctccagaagttgtctatctagtaaacgcgataatagatagtgctaaacgaattactgaatctattactgactttaatattgatacatacattaatgacctggtggaagctgaacacattaaacaaaaatctcagttaacgatcaacgagttcaaatatgaaatgctgcataactttttacctcatatgaactatacacccgatcaactaaagggattttatatgatatctttactaagaaagtttctctactgtatcttccacacttctagatatccagatagagattcgatggtttgtcatcgcatcctaacgtacggcaaatattttgagacgttggcacatgatgaattagagaattacataggcaacatccgaaacgatatcatgaacaatcacaagaacagaggcacttacgcggtaaacattcatgtactaacaactcccggacttaatcacgcgttttctagcttattgagtggaaagttcaaaaagtcagacggtagttatcgaacacatcctcactattcatggatgcagaatatttctattcctaggagtgttggattttatccggatcaagtaaagatttcaaagatgttttctgtcagaaaataccatccaagtcaatatctttacttttgttcatcagacgttccggaaagaggtcctcaggtaggtttagtatctcaattgtctgtcttgagttccattacaaatatactaacgtctgagtatttggatttggaaaagaaaatttgtgagtatatcagatcatattataaagatgatataagttactttgaaacaggatttccaatcactatagaaaatgctctagtcgcatctcttaatccaaatatgatatgtgattttgtaactgactttagacgtagaaaacggatgggattcttcggtaacttggaggtaggtattactttagttagggatcacatgaatgaaattcgcattaatattggagcgggaagattagtcagaccattcttggttgtggataacggagagctcatgatggatgtgtgtccggagttagaaagcagattagacgacatgacattctctgacattcagaaagagtttccgcatgtcatcgaaatggtagatatagaacaatttacttttagtaacgtatgtgaatcggttcaaaaatttagaatgatgtcaaaggatgaaagaaagcaatacgatttatgtgactttcctgccgaatttagagatggatatgtagcatcttcattagtgggaatcaatcacaattctggacccagagctattcttggatgtgctcaagctaaacaagctatctcttgtctgagctcggatatacgaaataaaatagacaatggaattcatttgatgtatccagagaggccaatcgtgattagtaaggctttagaaacttcaaagattgcggctaattgcttcggccaacatgttactatagcattaatgtcgtacaaaggtatcaatcaagaggatggaattatcatcaaaaaacaatttattcagagaggcggtctcgatattgttacagccaagaaacatcaagtagaaattccattggaaaactttaataacaaagaaagagataggtctaacgcctattcaaaattagaaagtaatggattagttagactgaatgctttcttggaatccggagacgctatggcacgaaatatctcatcaagaactcttgaagatgattttgctagagataatcagattagcttcgatgtttccgagaaatataccgatatgtacaaatctcgcgttgaacgagtacaagtagaacttactgacaaagttaaggtacgagtattaaccatgaaagaaagaagacccattctaggagacaaatttaccactagaacgagtcaaaagggaacagtcgcgtatgtcgcggatgaaacggaacttccatacgacgaaaatggtatcacaccagatgtcattattaattctacatccatcttctctagaaaaactatatctatgttgatagaagttattttaacagccgcatattctgctaagccgtacaacaataagggagaaaaccgacctgtctgttttcctagtagtaacgaaacatccatcgatacatatatgcaattcgctaaacaatgttatgagcattcaaatccgaaattgtccgatgaagaattatcggataaaatcttttgtgaaaagattctctatgatcctgaaacggataagccttatgcatccaaagtattttttggaccaatttattacttgcgtctgaggcatttaactcaggacaaggcaaccgttagatgtagaggtaaaaagacgaagctcattagacaggcgaatgagggacgaaaacgtggaggaggtatcaagttcggagaaatggagagagactgtttaatagcgcatggtgcagccaatactattacagaagttttgaaagattcggaagaagattatcaagatgtgtatgtttgtgaaaattgtggagacatagcagcacaaatcaagggtattaatacatgtcttagatgttcaaaacttaatctctctcctctcttaacaaaaattgataccacgcacgtatctaaagtatttcttactcaaatgaacgccagaggcgtaaaagtcaaattagatttcgaacgaaggcctccttcgttttataaaccattagataaagttgatctcaagccgtcttttctggtgtaatattctagtttggtagtagatacatatcaatatcatcaaattcgagatccgaattataaaatgggcgtggattgttaactatagaatcggacgtctgatattcgaaaatctgtggagtttcaggttttggtggaggtgtaactgctacttgggatactgaagtctgatattcagaaagctgtggatgttctggttcggcatccaccgatggtgtcacatcactaatcggttcggtaacgtctgtggatggaggtgctacttctacagaacctgtagcctcagttgtcaacggagatacatttttaatgcgagaaaatgtataatttggtaatggtttcttatgtggatctgaagaagaggtaagatatctactagaaagataccgatcacgttctagttctcttttgtagaacttaactttttctttctccgcatctagttgatattccaacctcttcacgttactacgttcagattccaattcacgttcgcatgggttacctccgcagtttttacgagcgatttcacgttcagccttcatgcgtctctccctctctctatcgagtttatcagagcagtctttctgaaggcgatcgaactccataaatttctccaacgctttgattgtttccatagatttccgaagttcagcttttaggactgtgattctttttctttcgaattcacagctggatgtacaaccgtttccattaccgccatctctaagtttcttttctagatcggcaacatttcatccccatgccttttacattcctcgagtctactgtcgtcgaaatatcgttccagctccttttcgacatcaataactttagcacgttgtctctcaagctctcttttgtagttatctgattccctggcacgtttaagatcttcatgcaattgagtcagctcttaacttcctctcttgcttcttcgtcatagtacgcgcaatcactgtgagatccattgttaccacgtctacactcggcgagctcgcgtttaagagattcaatttcccgtttgtattggtccatgtttccattgctaccaccattagatttacaggctgctagttgtcgttcgagatcagaaatacgggttttcttggaattgatttcgtcgatgtacttggcatcgaaacacttattaagttctttttccaattctacgattttatttctttcgcgagtcaattccctcctgtagtaactatctgttttgtcagattcacgctctctacgtagactttcttgcaagttactaatttgttccctagcacgtccgagtttagttttatatgctgaatagagttctgattcatcctttgagcagatctctagcgatcgtttaagattcctaattctagtctttagcctatttacctcctcagaagatgttccgttaccgttgcgtttacactcgttaagctgtctatcaagatccatgattctatctctaagacgttgcatctctctttccatatcagcattgctttcattattacgtctgcagtcactcaactgtctttcaatatctgagattctatctctaagacgtcgcatctctctctgtttcggcattggtttcattattacgtttacagtcgttcaactgtctttcaagatctgatattctagattggagtctgctaatctctgtagcattttcacggcattcactcagttgtctttcaagatctgaaattttagattggagtctgctaatctctgtaagatttcctcctccgctctcgatgcagtcggtcaacttattctctagttctctaatacgcgaacgcagtgcatcaacttcttgcgtgtcttcctggttgcgtgtacattcatcgagatctctaacgcgtcgtcgttcttcctcaagttctctgcgtactacagaaagcgtgtccctatcttgttgatatttagcaatttctgattctagagtactgattttgcttacgtagttactaatagttgtcttggccttatcaagatcctccttgtatttgtcgcattccttgatatccctacgaagtctggacagttcccattcgacattacgacgtttatcgatttcagctcggagatcgtcatcgcgttgttttagccacatacgactgagttcaagttctcgttgacaagatccatctacttttccattcctaatagtatccagttccttttctagttctgaacgcatttctcgttccctatcaagcgattctctcaattctcggatagtcttcttatcaatttctaataaatctgaaccatcatctgtcccattttgaatatccctgtgttctttgatctcttttgtaagtcggtcgattctttcggttttataaacagaatccctttccaaagtcctaatcttactgagtttatcactaagttctgcattcaattcggtgagttttctcttggcttcttccaactctgttttaaactctccactatttccgcattcttcctcgcatttatctaaccattcaattagtttattaataactagttggtaatcagcgattcctatagccgttcttgtaattgtgggaacataattaggatcttctaatggattgtatggcttgatagcatcatctttatcattattagggggatggacaaccttaattggttggtcctcatctcctccagtagcgtgtggttcttcaataccagtgttagtaataggcttaggcaaatgcttgtcgtacgcgggcacttcctcatccatcaagtatttataatcgggttctacttcagaatattcttttctaagagacgcgacttcgggagttagtagaagaactctgtttctgtatctatcaacgctggaatcaatactcaagttaaggatagcgaatacctcatcgtcatcatccgtatcttctgaaacaccatcatatgacatttcatgaagtctaacgtattgataaatagaatcagatttagtattaaacagatccttaacctttttagtaaacgcatatgtatattttagatctccagatttcataatatgatcacatgccttaaatgtcagtgcttccatgatataatctggaacactaatgggtgacgaaaaagatacagcaccatatgctacgttgataaataaatctgaaccactaagtagataatgattaatgttaagaaagaggaaatattcagtgtataggtatgtcttggcgtcatatcttgtactaaacacgctaaacagtttgttaatgtgatcaatttccaatagattaattagagcagcgggaataccaacaaacatattaccacatccgtattttctatgaatatcacatatcatgttaaaaaatcttgatagaagagcgaatatctcgtctgacttaatgagtcgtagttcagcagcaacataagtcataactgtaaatagaacatactttcctgtagtgttgattctagactccacatcaacaccattattaaaaatagttttatatacatctttaatctgctctccgttaatcgtcgaacgttctagtatacggaaacactttgatttcttatctgtagttaatgacttagtgatatcacgaagaatattacgaattacatttcttgtttttcttgagagacctgattcagaactcaactcatcgttccatagtttttctacctcagtggcgaaatctttggagtgcttggtacatttttcaataaggttcgtgacctccatttattataaaaaatttattcaaaacttaactacaatcgggtaattataagatcgtagatctcccatgtggcggaatactaccatctatcgcatgtggatggacagtaggtaatggccatgggaacagtaatgtttgcatatttatctttcttgctagtattactgcatattgtcccaatgtttcgatgtgatgttctaacctatcaactgccgctgtatcacaacaatagtgtccgatgaaattaagattatgatccaatgtgtttaatatatgattatcaagtcttatacgatccgcgtcttttttgacaggatcaggttcttctacaggaagaagtttcggcctcttatgatattcatgtctgggaaacggtggtctagggtgaggctccggtatcggagtgggttttggattataatcatcatcgtctatgacatcatcttcgacttcgatatttattttgctatcttgatgatgtcctgtatcagttgcattttcagcactcgactgaatattagcgcattcattgtctattattaccatatttctaaacccaaaatgtatgtgttgaacatcagtactatcgttgatgagtcttatagcatgaattcgcttatcgttatcgggtttatcttctgtcaccttagcaattccttttttattaaactctacataatcatatccatttctattgtttgttctaatataaacgagtatagcatcattgctaaatttttcaatagtatcaaaaacagaatatcctaaaccatataatatatattcaggaacactcaaactaaatgtccaggattctcctaaatacgtaaactttaatagtgcgaaatcattcaaaaatctaccacttatagatagatagtacataaatgcgtatagtagtctacctatctctttattatgaaaaccggcattacgatcatatatgtcgtgatatacctgtgatccgtttacgttaaaccataaatacatgggtgatcctataaacatgaatttatttctaattctcagagctatagttaattgaccgtgtaatatttgcttacatgcatacttgatacgcttattaataagatttttatcattgctcgttatttcagaatcgtatatataaggagtaccatcgtgattcttaccagatattatacaaaatactatatataaaatatattgacccacgttagtaatcatataaatgtttaacgttttaaattttgtattcaatgatccattatcatacgctatcatggtcttgtaatattcattctttaaaatataatattgtgttagccattgcattggagctcctaatggagattttctattctcatccattttaggataggctttcataaagtccctaataacttcgtgaataatgtttctatgttttctactgatgcatgtatttgcttcgatttttttatcccatgtttcatctatcatagatttaaacgcagtaatgctcgcaacattaacatcttgaaccgttggtacaattccgttccataaatttataatgttcgccatttatataactcattttttgaatatacttttaattaacaaaagagttaagttactcatatggacgccgtccagtctgaacatcaatctttttagccagagatatcatagccgctcttagagtttcagcgtgattttccaacctaaatagaacttcatcgttgcgtttacaacacttttctatttgttcaaactttgttgttacattagtaatctttttttccaaattagttagccgttgtttgagagtttcctcattgtcgtcttcatcggctttaacaattgcttcgcgtttagcctctggctttttagcagcctttgtagaaaaaaattcagttgctggaattgcaagatcgtcatctccggggaaaagagttccgtccatttaaagtacagattttagaaactgacactctgcgttatttatatttggtacaacacatggattataaatattgatgttaataacatcagaaaatgtaaagtctatacattgttgcatcgtgttaaattttctaatggatctagtattattgggtccaacttctgcctgaaatccaaatatggaagcggatacaaaaccgtttcctggataaaccacacatctccacttttgctttacatcagaaattgtgtcgttgacatcttgaactctcctatctaatgccggtgttccacctatagattttgaatattcgaatgctgcatgagtagcattaaattccttaatattgccataattttcatatattgagtaaccctggataaaaagtaaacacaccgcagccgtcgctaccacaataaaaaaaattgatagagagttcatttataatctattagaagctgacaaaatttttttacacgcatcagacaatgctttaataaatagttcaacatctacttttgtcatatcgaaccgatggtatgattctaacctagaattacatccgaaaaagttgactatgttcatagtcattaagtcattaacaaacaacattccagactctggattataagacgatactgtttcgtcacaattacctaccttaatcatgtgattatgaatattggctattagagcaccttctaagaaatctataatatctttgaaacacgatttaaaatcaaaccacgaatatacttctacgaagaaagttagtttacccataggagaaataactataaatggagatctaaatacaaaatccggatctatgatagttttaacattattatattctctattaaatacctccacatctaaaaatgttaattttgaaactatgtcttcgtttattaccgtacctgaactaaacgctataagctctattgtttgagaactctttaaacgatattcttgaaatacatgtaacaaagtttcctttaactcggtcggtttatctaccatagttacagaatttgtatccttatctataatataataatcaaaatcgtataaagttatataattatcgcgttcagattgtgatcttttcaaatagactaaaaaccccatttctctagtaagtatcttatgtatatgtttgtaaaatatcttcatggtgggaatatgctctaccgcagttagccattcctcattgacagcggtagatgtattagacaaaactattccaatgtttaacaagggccattttacgagattattaaatccttgtttgataaatgtagccaatgagggttcgagttcaacgacgattgaattctcttcccgcggatgctgcatgatgaacgacgggatgttgttcgattgatttggaattctttttcgactttttgtttatattaaatattttaaaatttatagcggatagcaattcatgtaccacggataatgtagacgcgtattgcgcatcgatatctttattattagataaatttatcaataaatgtgagaagtttgcctcgttaaggtcttccatttaaatattatataaacatttgtgtttgtatcttattcgtcttttatggaatagttttttactagtaaagctgcaattacacactttgtccgtaaaacataaatataaacaccagcttttatcaatcgttccaaaaagtcgacggcggacatttttaacatggcatctattttaaatacacttaggtttttggaaaaaacatcattttataattgtaacgattcaataactaaagaaaagattaagattaaacataagggaatgtcatttgtattttataagccaaagcattctaccgttgttaaatacttgtctggaggaggtatatatcatgatgatttggttgtattggggaaggtaacaattaataatctaaagatgatgctattttacatggatttatcatatcatggagtgacaagtagtggagcaatttacaaattgggatcgtctatcgatagactttctctaaataggactattgttacaaaagttaataattatgatgatacattttttgacgacgatgattgatcgctattgcacaattttgtttttgtactttctaatatagtgtttaggttctttttcatatgagaatattgatttactaaaatatctatgtttaacttttgttctatgacgtccttatcggcggtatcggtacatatacgtaattcaccttcacaaaatacggagtcttcgataataatagccaatcgattattggatctagctgtctgtatcatattcaacatgtttaatatatcctttcgtttcccctttacaggcatcgatcgtagcatattttccgcgtctgatatggaaatgttaaaactacaaaaatgcgtaatgttagcccgtcctaatattggtacgtgtctataagtttggcatagtagaataatagacgtgtttaaatgccttccaaagtttaagaattctattagagtattgcattttgatagtttatcgcctacatcatcaaaaataagtaaaaagtgtgctgattttttatgattttgtgcgacagcaatacatttttctatgttacttttagttcgtatcagattatattctagagattcctgactactaacgaaattaatatgatttggccaaatgtatccatcataatctgggttataaacgggtgtaaacaagaatatatgtttatattttttaactagtgtagaaaacagagatagtaaatagatagtttttccagatccagatcctcctgttaaaaccattctaaacggcatttttaataaattttctcttgaaaattgtttttcttggaaacaattcataattatatttacagttactaaattaatttgataataaatcaaaatatggaaaactaaggttgttagtagggaggagaacaaagaaggcacatcgtgatataaataacatttattatcatgatgacaccagaaaacgacgaagagcagacatctgtgttctccgctactgtttacggagacaaaattcagggaaagaataaacgcaaacgcgtgattggtctatgtattagaatatctatggttatttcactactatctatgattaccatgtccgcgtttctcatagtgcgcctaaatcaatgcatgtctgctaacgaggctgctattactgacgccgctgttgccgttgctgctgcatcatctactcatagaaaggttgcgtctagcactacacaatatgatcacaaagaaagctgtaatggtttatattaccagggttcttgttatatattacattcagactaccagttattctcggatgctaaagcaaattgcactgcggaatcatcaacactacccaataaatccgatgtcttgactacctggctcattgattatgttgaggatacatggggatctgatggtaatccaattacaaaaactacatccgattatcaagattctgatgtatcacaagaagttagaaagtatttttgtgttaaaacaatgaactaatatttatttttgtacattaataaatgaaatcgcttaatagacaaactgtaagtaggtttaagaagttgtcggtgccggccgctataatgatgatactctcaaccattattagtggcataggaacatttctgcattacaaagaagaactgatgcctagtgcttgcgccaatggatggatacaatacgataaacattgttatttagatactaacattaaaatgtctacagataatgcggtttatcagtgtcgtaaattacgagctagattgcctagacctgatactagacatctgagagtattgtttagtattttttataaagattattgggtaagtttaaaaaagaccaatgataaatggttagatattaataatgataaagatatagatattagtaaattaacaaattttaaacaactaaacagtacgacggatgctgaagcgtgttatatatacaagtctggaaaactggttaaaacagtatgtaaaagtactcaatctgtactatgtgttaaaaaattctacaagtgacaacaaaaaatgaattaataataagtcgttaacgtacgccgccatggacgccgcgtttgttattactccaatgggtgtgttgactataacagatacattgtatgatgatctcgatatctcaatcatggactttataggaccatacattataggtaacataaaaactgtccaaatagatgtacgggatataaaatattccgacatgcaaaaatgctactttagctataagggtaaaatagttcctcaggattctaatgatttggctagattcaacatttatagcatttgtgccgcatacagatcaaaaaataccatcatcatagcatgcgactatgatatcatgttagatatagaagataaacatcagccattttatctattcccatctattgatgtttttaacgctacaatcatagaagcgtataacctgtatacagctggagattatcatctaatcatcaatccttcagataatctgaaaatgaaattgtcgtttaattcttcattctgcatatcagacggcaatggatggatcataattgatgggaaatgcaatagtaattttttatcataaaagttgtaaagtaaataataaaacaataaatattgaactagtagtacgtatattgagcaatcagaaatgatgctggtacctcttatcacggtgaccgtagttgcgggaacaatattagtatgttatatattatatatttgtaggaaaaagatacgtactgtctataatgacaataaaattatcatgacaaaattaaaaaagataaagagttctaattccagcaaatctagtaaatcaactgatagcgaatcagactgggaggatcactgtagtgctatggaacaaaacaatgacgtagataatatttctaggaatgagatattggacgatgatagcttcgctggtagtttaatatgggataacgaatccaatgttatggcgcctagcacagaacacatttacgatagtgttgctggaagcacgctgctaataaataatgatcgtaatgaacagactatttatcagaacactacagtagtaattaatgaaacggagactgttgaagtacttaatgaagataccaaacagaatcctaactattcatccaatcctttcgtaaattataataaaaccagtatttgtagcaagtcaaatccgtttattacagaacttaacaataaatttagtgagaataatccgtttagacgagcacatagcgatgattatcttaataagcaagaacaagatcatgaacacgatgatatagaatcatcggtcgtatcattggtgtgattagtttcctttttataaaattgaagtaatatttagtattattgctgccgtcacgttgtacaaatggagatattccctgtattcggcatttctaaaattagcaattttattgctaataatgactgtagatattatatagatacagaacatcaaaaaattatatctgatgagatcaatagacagatggatgaaacggtacttcttaccaacatcttaagcgtagaagttgtaaatgacaatgagatgtaccatcttattcctcatagattatcgacgattatactctgtattagttctgtcggaggatgtgttatctctatagataatgacatcaatggcaaaaatattctaacctttcccattgatcatgctgtaatcatatccccactgagtaaatgtgtcgtagttagcaagggtcctacaaccatattggttgttaaagcggatatacctagcaaacgattggtaacatcgtttacaaacgacatactatatgtaaacaatctgtcactgattaattatttgccgttgtctgtattcattattagacgagtcaccgactatttggatagacacatatgcgatcagatatttgctaataataagtggtattcccttataaccatcgacgataagcaatatcctattccatcaaactgtataggtatgtcctctgccaagtacataaattctagcatcgagcaagatactttaatccatgtttgtaacctcgagcatccgttcgactcagtatacaaaaaaatgcagtcgtacaattctctacctatcaaggaacaaatattgtacggtagaattgataatataaatatgagcattagtatttctgtggattaatagatttctagtatggggatcattaatcatctctaatctctaaatacctcataaaacgaaaaaaaagctattatcaaatactgtacggaatggattcattctcttctctttttatgaaactctgttgtatatctactgataaaactggaagcaaaaaatctgatagaaagaataagaataagatcaaggattatatggaacacgattattataaaataacaatagttcctggttcctcttccacgtctactagctcgtggtattatacacatgcctagtaatagtctctttgcgttgacggaaagcagactagaaataacaggctaaaatgttcagacaccataatagttcccaacccagataataacagagttccatcaacacattcctttaaactcaatcccaaacccaaaaccgttaaaatgtatccggccaattgatagtagataatgaggtgtacagcgcatgataatttacacagtaaccaaaatgaaaatactttagtaattataagaaatatagacggtaatgtcatcatcaacaatccgataatatgcctgagagtaaacattgacggataaaacaaaaatgctccgcataactctatcatggcaataacacaaccaaatacttgtaagattcctaaattagtagaaaatacaacgaatatcgatgtataagtgatctcgagaaataataagaataaagtaatgcccgtaaagataaacatcaacattgtttggtaatcattaaaccaattagtatgaagttgaactaatttcacagtagattttattccagtgttatcctcgcatgtataagtacctggtaagatatctttatattccataatcaatgagacatcactatctgataacgaatgaagtctagcactagtatgccatttacttaatattgtcgtcttggaagttttattataagttaaaatatcatggttatccaatttccatctaatatactttgtcggattatctatagtacacggaataatgatggtatcattacatgctgtatactctatggtctttgtagttgttataacaaccaacgtatagaggtatatcaacgatattctaactcttgacattttttatttatttaaaatgatacctttgttatttattttattctattttgctaacggtattgaatggcataagtttgaaacgagtgaagaaataatttctacttacttattagacgacgtattatacacgggtgttaatggggcggtatacacattttcaaataataaactaaacaaaactggtttaactaataataattatataacaacatctataaaagtagaggatgcggataaggatacattagtatgcggaaccaataacggaaatcccaaatgttggaaaatagacggttcagacgacccaaaacatagaggtagaggatacgctccttatcaaaatagcaaagtaacgataatcagtcacaacggatgtgtactatctgacataaacatatcaaaagaaggaattaaacgatggagaagatttgacggaccatgtggttatgatttattcacggcggataacgtaattccaaaagatggtttacgaggagcattcgtcgataaagacggtacttatgacaaagtttacattcttttcactgatactatcggctcaaagagaattgtcaaaattccgtatatagcacaaatgtgcctaaacgacgaaggtggtccatcatcattgtctagtcatagatggtcgacgtttctcaaagtcgaattagaatgtgatatcgacggaagaagttatagacaaattattcattctagaactataaaaacagataatgatacgatactatatgtattcttcgatagtccttattccaagtccgcattatgtacctattctatgaataccattaaacaatctttttctacgtcaaaattggaaggatatacaaagcaattgccgtctccagctcctggtatatgtttaccagctggaaaagttgttccacataccacgtttgaagtcatagaacaatataatgtactagatgatattataaagcctttatctaaccaacctatcttcgaaggaccgtctggtgttaaatggttcgatataaaggagaaggaaaatgaacatcgggaatatagaatatacttcataaaagaaaattctatatattcgttcgatacaaaatctaaacaaactcgtagctcgcaagtcgatgcgcgactattttcagtaatggtaactgcgaaaccgttatttatagcagatatagggataggagtaggaatgccacaaatgaaaaaaatacttaaaatgtaatcttaatcgagtacaccacacgacaatgaacaaacataagacagattatgctggttatgcttgctgcgtaatatgcggtctaattgtcggaattatttttacagcgacactattaaaagttgtagaacgtaaattagttcatacaccattaatagataaaacgataaaagatgcatatattagagaagattgtcctactgactggataagctataataataaatgtatccatttatctactgatcgaaaaacctgggaggaaggacgtaatgcatgcaaagctctaaattcaaattcggatctaattaagatagagactccaaacgagttaagttttttaagaagccttagacgaggctattgggtaggagaatccgaaatattaaaccagacaaccccatataattttatagctaagaatgccacgaagaatggaactaaaaaacggaaatatatttgtagcacaacgaatactcccaaactgcattcgtgttacactatataacaattacactacatttttatcataccactacttcggttagatgttttagaaaaaaataaatatcgccgtaccgttcttgtttttataaaaataacaattaacaattatcaaattttttctttaatattttacgtggttgaccattcttggtggtaaaataatctcttagtgttggaatggaatgctgtttaatgtttccacactcatcgtatattttgacgtatgtagtcacatcgtttacgcaatagtcagactgtagttctatcatgcttcctacatcagaaggaggaacagttttaaagtctcttggttttaatctattaccgttagttttcatgaaatcctttgttttatccacttcacattttaaataaatgtccactatacattcttttgttaattttactagatcgtcatgggtcatagaatttataggttccgtagtccatggatccaaactagcaaacttcgcgtatacggtatcgcgattagtgtatacaccaactgtatgaaaattaagaaaacagtttaataaatcaacagaaatatttaatcctccgtttgatacagatgcgccatatttatggatttcggattcacacgttgtttgtctgaggtgttcgtctagtgttgcttctacgtaaacttcgattcccatatattctttattgtcagaatcgcataccgatttatcatcatacactgtttgaaaactaaatggtatacacatcaaaataataaataataacgagtacattctgcaatattgttatcgtaattggaaaaatagtgttcgagtgagttggattatgtgagtattggattgtatattttattttatattttgtaataagaataaaatgctaatgtcaagtttattccaatagatgtcttattaaaaacatatataataaataacaatggctgaatggcataaaattatcgaggatatctcaaaaaataataagttcgaggatgccgccatcgttgattacaagactacaaagaatgttctagctgctattcctaacagaacatttgccaagattaatccgggtgaaattattcctctcatcactaatcgtaatattctaaaacctcttattggtcagaaatattgtattgtatatactaactctctaatggatgagaacacgtatgctatggagttgcttactgggtacgcccctgtatctccgatcgttatagcgagaactcataccgcacttatatttttgatgggtaagccaacaacatccagacgtgacgtgtatagaacgtgtagagatcacgctacccgtgtacgtgcaactggtaattaaaataaaaagtaatattcatatgtagtgtcaattttaaatgatgatgatgaaatggataatatccatattgacgatgtcaataatgccggtattggcatacagttcatcgatttttagatttcattcagaggatgtggaattatgttatgggcatttgtattttgataggatctataatgtagtaaatataaaatataatccgcatattccatatagatataattttattaatcgcacgttaaccgtagatgaactagacgataatgtcttttttacacatggttattttttaaaacacaaatatggttcacttaatcctagtttgattgtctcattatcaggaaacttaaaatataatgatatacaatgctcagtaaatgtatcgtgtctcattaaaaatttggcaacgagtacatctactatattaacatctaaacataagacttattctctacatcggtccacgtgtattactataataggatacgattctattatatggtataaagatataaatgacaagtataatgacatctatgattttactgcaatatgtatgctaatagcgtctacattgatagtgaccatatacgtgtttaaaaaaataaaaatgaactcttaattatgctatgctattagaaatggataaaatcaaaattacggttgattcaaaaattggtaatgttgttaccatatcgtataacttggaaaagataactattgatgtcacacctaaaaagaaaaaagaaaaggatgtattattagcgcaatcagttgctgtcgaagaggcaaaagatgtcaaggtagaagaaaaaaatattatcgatattgaagatgacgatgatatggatgtagaaagcgcgtaatacgatctataaaaataagtatataaatactttttatttactgtactcttactgtgtagtggtgataccctactcgattatttttttaaaaaaaaaatacttattctgattcttctagccatttccgtgttcgtttgaatgccacatcgacgtcaaagataggggagtagttgaaatctagttctgcattgttggtacgcacctcaaatgtagtgttggatatcttcaacgtatagttgttgagtagtgatggttttctaaatagaattctcttcatatcattcttgcacgcgtacatttttagcatccatcttggaatcctagatccttgttctattcccaatggtttcatcaatagaagattaaacatatcgtacgaacacgatggagagtaatcgtagcaaaagtaagcatttcctttaatcttagatcccggatactggatatattttgcagccaacacgtgcatccatgcagcatttcctacatatacccggctatgcaccgcgtcatcatcgactgtacgatacataatgttaccgtgttgcttacattgctcgtaaaagactttcatcaatttgtctccttctccgtaaattccagtgggtcttaggcaacaagtatacaattttgctccattcatgattacggaattattggctttcataaccagttgctcggccatacgtttactttttgcgtatacatgtcctggtgatatatcataaagggtatgctcatggccgatgaatggatcaccgtgtttattgggtcctattgcttccatgctactagtatagatcaaatacttgattcctaggtccacacaagctgccaaaatagtctgtgttccataatagtttactttcatgatttcattatcggtgtattttccaaatacatccactagagcagccgtatgaataatcagatttaccccatctagcgcttctctcaccttatcaaagtcgtttatatcacattgtatatagtttataaccttaactttcgaggttattggttgtggatcttctacaatatctatgactctgatttcttgaacatcatctgcactaattaacagttttactatatacctgcctagaaatccggcaccaccagtaaccgcgtacacggccattgctgccactcataatatcagactacttattctattttactaaataatggctgtttgtataatagaccacgataatatcagaggagttatttactttgaaccagtccatggaaaagataaagttttaggatcagttattggattaaaatccggaacgtatagtttgataattcatcgttacggagatattagtcaaggatgtgattccataggcagtccagaaatatttatcggtaacatctttgtaaacagatatggtgtagcatatgtttatttagatacagatgtaaatatatttacaattattggaaaggcgttatctatttcaaaaaatgatcagagattagcgtgtggagttattggtatttcttacataaatgaaaagataatacattttcttacaattaacgagaatggcgtttgatatatcagttaatgcgtctaaaacaataaatgcattagtttacttttctactcagcaaaataaattagtcatacgtaatgaagttaatgatacacactacactgtcgaatttgatagggacaaagtagttgacacgtttatttcatataatagacataatgacaccatagagataagaggggtgcttccagaggaaactaatattggttgcgcggttagtatgacttacttgtataataagtatagttttaaactgattttagcagaatatataagacacagaaatactatatccggcaatatttattcggcattgatgacactagatgatttggctattaaacagtatggagacattgatctattatttaatgagaaacttaaagtagactccgattcgggactatttgactttgtcaactttgtaaaggatatgatatgttgtgattctagaatagtagtagctctatctagtctagtatctaaacattgggaattgacaaataaaaaatataggtgtatggcattagccgaacatatatctgatagtattccaatatctgagctatctagactacgatacaatctatgtaagtatctacgcggacacactgagagcatagaggataaatttgattattttgaagacgatgattcgtctacatgttctgccgtaaccgacagggaaacggatgtataattttttttatagcgtgaaggatatgataaaaaatataattgttgtatttatcccattccaatcaccttatatgattctgtaacacaataaaggagtcttatagatgtatagaggtcagatactggtttgataaactgtttattccacataagtatgtttgactttatggttagacccgcatactttaacaaatcactgaaaattggagttaggtattgacctctcagaatcagttgccgttctggaacattaaatgtattttttatgatatactccaacgcatttatgtgggcatacaacaagtcattactaatggaatattccaagagttttagttgtctagtatttaacaagagaagagatttcaacagactgtttatgaactcgaatgccgcctcattgtcgcttatattgatgatgtcgaattctcccaatatcatcaccgatgagtagctcatcttgttatcgggatccaagttttctaaagatgtcattaaaccctcgatcatgaatggatttatcatcatcgtttttatgttggacatgagcttagtccgtttgtccacatctatagaagatgatttctgaattatttcatatatctctctctttaactccaggaacttgtcaggatggtctactttaatatgttctcgtctaagagatgaaaatctttggatggttgcacgcgacttttctctaaaggatgacgttgcccaagatcctctcttaaatgaatccatcttatccttggacaagatggacagtctattttccttagatggtttaatatttttgttacccatgatctataaaggtagacctaatcgtctcggatgaccatatatttattttcagttttattatacgcataaattgtaaaaaatatgttaggtttacgaaaatgtctcgtggggcattaatcgtttttgaaggattggacaaatctggaaaaacaacacaatgtatgaacatcatggaatcaataccttcaaacacaataaaataccttaactttcctcagagatccactgtcactggaaagatgatagatgactatctaactcgtaaaaaaacctataatgatcatatagttaatctattattttgtgcaaatagatgggagtttgcatcttttatacaagaacaactagaacagggaattactttaatagttgatagatacgcattttctggagtagcgtatgccgccgctaaaggcgcgtcaatgactctcagtaagagttatgaatctggattgcctaaacccgacttagttatattcttggaatctggtagcaaagaaattaatagaaacgtcggtgaggaaatttatgaagatgttacattccaacaaaaggtattacaagaatataaaaaaatgattgaagaaggagatattcattggcaaattatttcttctgaattcgaggaagatgtaaagaaggagttgattaagaatatagttatagaggctatacacacggttactggaccagtggggcaactgtggatgtaatagtgaaattacattttttataaatagatgttagtacagtgttataaatggatgaagcatattactctggcaacttggaatcagtactcggatacgtgtccgatatgcataccgaactcgcatcaatatctcaattagttattgccaagatagaaactatagataatgatatattaaacaaggacattgtaaattttatcatgtgtagatcaaacttggataatccatttatctctttcctagatactgtatatactattatagatcaagagaactatcagactgagttgattaattcattagacgacaatgaaattatcgattgtatagttaataagtttatgagcttttataaggataacctagaaaatatagtagatgctatcattactctaaaatatataatgaataatccagattttaaaactacgtatgccgaagtactcggttccagaatagccgatatagatattaaacaagtgatacgtaagaatatactacaattgtctaataatatccgcgaacgatatttgtgaaaatattaaaaaaaaatactttttttattaaatgacgtcttttcgtgaatttagaaaattatgctgtgctatatatcacgcatcaggatataaagaaaaatctaaattaattagagactttataacagatagggatgataaatatttgatcattaagctattgcttcccggattagacgatagaatttataacatgaacgataaacaaattataaaattatatagtataatatttaaacaatctcaggaagatatgctacaagatttaggatacggatatataggagacactattaggactttcttcaaagagaacacagaaatccgtccacgagataaaagcattttaactttagaagaagtggatagttttttaactacgttatcatccgtaactaaagaatcgcatcaaataaaattattgactgatgtagcatctgtttgtacatgtaatgatttaaaatgtgtagtcatgcttattgataaagatctaaaaattaaagcgggtcctcggtacgtacttaacgctattagtcctaatgcctatgatgtgtttagaaaatctaataacttgaaagagataatagaaaattcatctaaacaaaatctagactctatatctatttctgttatgactccaattaatcccatgttagcggaatcgtgtgattctgtcaataaggcgtttaaaaaatttccatcaggaatgtttgcggaagtcaaatacgatggtgaaagagtacaagttcataaaaataataacgagtttgccttctttagtagaaacatgaaaccagtactctctcataaagtggattatctcaaagaatacataccgaaagcatttaaaaaagctacgtctatcgtattggattctgaaattgttcttgtagacgaacataatgtaccgctcccgtttggaagtttaggtatacacaaaaagaaagaatataaaaactctaacatgtgtttgttcgtgtttgactgtttgtactttgatggattcgatatgacggacattccattgtacgaacgaagatcttttctcaaagatgttatggttgaaatacccaatagaatagtattctcagagttgacgaatattagtaacgagtctcagttaactgacgtattggatgatgcactaacgagaaaattagaaggattggtcttaaaagatattaatggagtatacgaaccgggaaagagaagatggttaaaaataaagcgagactatttgaacgagggttccatggcagattctgccgatttagtagtactaggtgcctactatggtaaaggagcaaagggtggtatcatggcagtctttctaatgggttgttacgacgatgaatccggtaaatggaagacggttaccaagtgttcaggacacgatgataatacgttaagggagttgcaagaccaattaaagatgattaaaattaacaaggatcccaaaaaaattccagagtggttagtagttaataaaatctatattcccgattttgtagtagaggatccgaaacaatctcagatatgggaaatttcaggagcagagtttacatcttccaagtcccataccgcaaatggaatatccattagatttcctagatttactaggataagagaggataaaacgtggaaagaatctactcatctaaacgatttagtaaacttgactaaatcttaatagttacatacaaactgaaaattaaaataacactatttagttggtggtcgccatggatggtgttattgtatactgtctaaacgcgctagtaaaacatggcgaggaaataaatcatataaaaaatgatttcatgattaaaccatgttgtgaaagagtttgtgaaaaagtcaagaacgttcacattggcggacaatctaaaaacaatacagtgattgcagatttgccatatatggataatgcggtatccgatgtatgcaattcactgtataaaaagaatgtatcaagaatatccagatttgctaatttgataaagatagatgacgatgacaagactcctactggtgtatataattattttaaacctaaagatgccattcctgttatcatatctataggaaaggataaagatgtctgtgaactattaatctcatcagacatatcgtgtgcatgcgtggagttaaattcatatcacgtagccattcttcccatggatgtttccttttttaccaaaggaaatgcatcattgattattctcctgtttgatttctctatcgatgcggcacctctcttaagaagtgtaaccgataataatgttattatatctagacaccagcgtctacatgacgagcttccgagttccaattggttcaagttttacataagtataaagtccgactattgttctatattatatatggttgttgatggatctgtgatgcatgcgatagctgataatagaactcacgcaattattagcaaaaatatattagacaatactacgattaacgatgagtgtagatgctgttattttgaaccacagattaggattcttgatagagatgagatgctcaatggatcatcgtgtgatatgaacagacattgtattatgatgaatttacctgatgtaggcgaatttggatctagtatgttggggaaatatgaacctgacatgattaagattgctctttcggtggctggtaatttaataagaaatcgagactacattcccgggagacgaggatatagctactacgtttacggtatagcctctagataatttttttaagcacgaaataaaaaacataattttaaaccaatctatttcatactattttgtgtgatcaccatggacataaagatagatattagtatttctggtgataaatttacggtgactactaggagggaaaatgaagaaagaaaaaaatatctacctctccaaaaagaaaaaactactgatgttatcaaacctgattatcttgagtacgatgacttgttagatagagatgagatgtttactattctagaggaatattttatgtacagaggtctattaggcctcagaataaaatatggacgactctttaacgaaattaaaaaattcgacaatgatgcggaagaacaattcggtactatagaagaactcaagcagaaacttagattaaattctgaagagggagcagataactttatagattatataaaggtacaaaaacaggatatcgtcaaacttactgtatacgattgcatatctatgataggattgtgtgcatgcgtggtagatgtttggagaaatgagaaactgttttctagatggaaatattgtttacgagcgattaaactgtttattgatgatcacatgcttgataagataaaatctatactgcagaatagactagtatatgtggaaatgtcatagaaagttaaaagttaatgagagcaaaaatatataaggttgtattccatatttgttatttttttctgtaatagttagaaaaatacattcgatggtctatctatcagattattatgtgttataaggtactttttctcataataaactagagtatgagtaagatagtgtttttcaaaacatataaatctaaaattgatggatgagatatacagctattaatttcgaaaatatattttaatctgataactttaaacatggatttttaatggtggtttaacgttttaaaaaaagattttgttattgtagtatatgataatattaaaagatggatataaagaatttgctgactgcatgtactattttttacattactacattggctacggcagatatacctacttcgtcactgccacacgctccggtaaacggggcatgtgacgagggagaatatcttgataagaggcataatcaatgttgtaatcagtgtccacctggagaatttgccaaggttagatgtaatggtaacgataacacaaaatgtgaacgctgcccacctcatacatataccgcaatccccaattactctaatggatgtcatcaatgtagaaaatgcccaacaggatcatttgataaggtaaagtgtaccggaacacagaacagtaaatgttcgtgtcttcctggttggtattgcgctactgattcttcacagactgaagattgtcgagattgtataccaaaaaggagatgtccatgcggatactttggtggaatagatgaacaaggaaatcctatttgtaaatcgtgttgtgttggtgaatattgcgactacctacgtaattatagacttgatccatttcctccatgcaaactatctaaatgtaattaattatgattttgatgataatgttaccatacattatatcgctacttggttagtgtattattcagtatgaagacctattaataattacttatcttttgacgatcttgttataattataatataaaaatacttatggcatagtaactcataattgctgacgcgataaattcgtaataatctgttttgttcaaatttttataaggaatctacaggcataaaaataaaaatataatttataatatactcttacagcgcgccatcatgaataacagcagtgaattgattgctgttattaatggatttagaaatagtggacgattttgtgatattaatatagttattaatgatgaaaggataaacgctcacagactcatcctatctggagcctccgaatatttttccattctgttttccaataattttatcgattctaatgaatacgaagttaatctaagtcatttagattatcaaagtgttaacgatttgatcgattacatttatgggatacctttgagcctaactaacgataacgtgaaatatattctttcaaccgctgattttttacaaattggatctgctattacggagtgtgaaaattacatacttaaaaatctttgttctagaaactgtatcgatttctacatatacgctgataaatataataacaagaaaatagaatcagcgtcgtttaacacaatattacaaaatattttgagactcatcaacgatgaaaactttaaatacttaacagaggaatcaatgataaaaattttaagcgatgatatgttaaatataaaaaatgaggatttcgccccactaattctcattaaatggttagagagtactcaacaaccatgcaccgtcgagttacttaaatgcctcagaatatcattgctttccccacaagttataaaatcactttatagtcatcgactggttagttcaatctacgaatgtataacattcttaaacaatatagcattcttggatgaatcatttcctagataccatagcatcgagttgatatctatcggtataagtaattcgcatgataagatttccataaactgctacaatcataaaaaaaatacatgggaaatgatatcttcacgtagatataggtgtagtttcgcagtggccgtcctggataatattatctatatgatgggtggatatgatcagtccccgtatagaagttcaaaggttatagcgtacaatacatgtacaaattcttggatatatgatataccagagctaaaatatcctcgttctaattgtgggggactggctgatgacgaatacatttattgtataggcggcatacgcgatcaggattcatcgttgacatctagtattgatagatggaagccatcaaaaccatattggcagaagtatgctaaaatgcgcgaaccaaaatgtgatatgggggttgcgatgttaaacggattaatatatgttataggtggaatcgttaaaggtgacacgtgtaccgacgcactagagagtttatcagaagatggatggatgaagcatcaacgtcttccaataaaaatgtccaatatgtcgacgattgttcatgatggcaagatttatatatctggaggttacaacaatagtagtgtagttaatgtaatatcgaatctagtccttagctataattcgatatatgatgaatggaccaaattatcatcattaaacattcctagaattaatcccgctctatggtcagcgcataataaattatatgtaggaggaggaatatctgatgatgttcgaactaatacatctgagacatacgacaaagaaaaagattgttggacattggataatggtcacgtgttaccacgcaattatataatgtataaatgcgaaccgattaaacataaatatccattggaaaaaacacagtacacgaatgattttctaaagtatttggaaagttttataggtagttgatagaacaaaatacataattttgtaaaaataaatcactttttatactaatatgacacgattaccaatacttttgttactaatatcattagtatacgctacaccttttcctcagacatctaaaaaaataggtgatgatgcaactctatcatgtaatcgaaataatacaaatgactacgttgttatgagtgcttggtataaggagcccaattccattattcttttagctgctaaaagcgacgtcttgtattttgataattataccaaggataaaatatcttacgactctccatacgatgatctagttacaactatcacaattaaatcattgactgctagagatgccggtacttatgtatgtgcattctttatgacatcaactacaaatgacactgataaagtagattatgaagaatactccacagagttgattgtaaatacagatagtgaatcgactatagacataatactatctggatctacacattcaccggaaactagttctaagaaacctgattatatagataattctaattgctcgtcggtattcgaaatcggtacccggggatcagcttgcatgcctgcagcaattcccgaggctgtagccgacgatggtgcgccaggagagttgttgattcattgtttgcctccctgctgcggtttttcaccgaagttcatgccagtccagcgtttttgcagcagaaaagccgccgacttcggtttgcggtcgcgagtgaagatccctttcttgttaccgccaacgcgcaatatgccttgcgaggtcgcaaaatcggcgaaattccatacctgttcaccgacgacggcgctgacgcgatcaaagacgcggtgatacatatccagccatgcacactgatactcttcactccacatgtcggtgtacattgagtgcagcccggctaacgtatccacgccgtattcggtgatgataatcggctgatgcagtttctcctgccaggccagaagttctttttccagtaccttctctgccgtttccaaatcgccgctttggacataccatccgtaataacggttcaggcacagcacatcaaagagatcgctgatggtatcggtgtgagcgtcgcagaacattacattgacgcaggtgatcggacgcgtcgggtcgagtttacgcgttgcttccgccagtggcgcgaaatattcccgtgcaccttgcggacgggtatccggttcgttggcaatactccacatcaccacgcttgggtggtttttgtcacgcgctatcagctctttaatcgcctgtaagtgcgcttgctgagtttccccgttgactgcctcttcgctgtacagttctttcggcttgttgcccgcttcgaaaccaatgcctaaagagaggttaaagccgacagcagcagtttcatcaatcaccacgatgccatgttcatctgcccagtcgagcatctcttcagcgtaagggtaatgcgaggtacggtaggagttggccccaatccagtccattaatgcgtggtcgtgcaccatcagcacgttatcgaatcctttgccacgcaagtccgcatcttcatgacgaccaaagccagtaaagtagaacggtttgtggttaatcaggaactgttcgcccttcactgccactgaccggatgccgacgcgaagcgggtagatatcacactctgtctggcttttggctgtgacgcacagttcatagagataaccttcacccggttgccagaggtgcggattcaccacttgcaaagtcccgctagtgccttgtccagttgcaaccacctgttgatccgcatcacgcagttcaacgctgacatcaccattggccaccacctgccagtcaacagacgcgtggttacagtcttgcgcgacatgcgtcaccacggtgatatcgtccacccaggtgttcggcgtggtgtagagcattacgctgcgatggattccggcatagttaaagaaatcatggaagtaagactgctttttcttgccgttttcgtcggtaatcaccattcccggcgggatagtctgccagttcagttcgttgttcacacaaacggtgatacgtacacttttcccggcaataacatacggcgtgacatcggcttcaaatggcgtatagccgccctgatgctccatcacttcctgattattgacccacactttgccgtaatgagtgaccgcatcgaaacgcagcacgatacgctggcctgcccaacctttcggtataaagacttcgcgctgataccagacgttgcccgcataattacgaatatctgcatcggcgaactgatcgttaaaactgcctggcacagcaattgcccggctttcttgtaacgcgctttcccaccaacgctgatcaattccacagttttcgcgatccagactgaatgcccacaggccgtcgagttttttgatttcacgggttggggtttctacaggacgtaacattctagtcgaggaattcatttatagcatagaaaaaaacaaaatgaaattctactatatttttacatacatatattctaaatatgaaagtggtgattgtgactagcgtagcatcgcttctagacatctatatactatatagtaataccaatactcaagactacgaaactgatacaatctcttatcatgtgggtaatgttctcgatgtcgatagccatatgcccggtagttgcgatatacataaactgatcactaattccaaacccacccgctttttatagtaagtttttcacccataaataataaatacaataattaatttctcgtaaaagtagaaaatatattctaatttattgcacggtaaggaagtagaatcataaagaacagtgacggatccccgatccccgacctgcaggcatgcaagctcgactccggaaccaattactgataatgtagaagatcatacagacaccgtcacatacactagtgatagcattaatacagtaagtgcatcatctggagaatccacaacagacgagactccggaaccaattactgataaagaagatcatacagttacagacactgtctcatacactacagtaagtacatcatctggaattgtcactactaaatcaaccaccgatgatgcggatctttatgatacgtacaatgataatgatacagtaccaccaactactgtaggcggtagtacaacctctattagcaattataaaaccaaggactttgtagaaatatttggtattaccgcattaattatattgtcggccgtggcaattttctgtattacatattatatatataataaacgttcacgtaaatacaaaacagagaacaaagtctagatttttgacttacataaatgtctgggatagtaaaatctatcatattgagcggaccatctggtttaggaaagacagccatagccaaaagactatgggaatatatttggatttgtggtgtcccataccactagatttcctcgtcctatggaacgagaaggtgttgattaccattacgttaacagagaggccatctggaagggaatagccgccggaaactttctagaacatactgagtttttaggaaatatttacggaacttctaaaacagctgtgaatacagcggctattaataatcgtatttgtgtgatggatctaaacatcgacggtgttagaagtcttaaaaatacgtacctaatgccttactcggtgtatataagacctacctctcttaaaatggttgagaccaagcttcgtcgtagaaacactgaagctaacgatgagattcatcgtcgtgtgatgttggcaaaaactgacatggatgaggcaggtgaagccggtctattcgacactattatcattgaagatgatgtgaatttagcatatagtaagttaattcagatactacaggaccgtattagaatgtattttaacactaattagagacttaagacttaaaacttgataattaataatataactcgtttttatatgtgtctatttcaacgtctaatgtattagttaaatattaaaacttaccacgtaaaacttaaaatttaaaatgatatttcattgacagatagatcacacattatgaactttcaaggacttgtgttaactgacaattgcaaaaatcaatgggtcgttggaccattaataggaaaaggtggattcggtagtatttatactactaatgacaataattatgtagtaaaaatagagcccaaagctaacggatcattatttaccgaacaggcattttatactagagtacttaaaccatccgttatcgaagaatggaaaaaatctcacaatataaagcacgtaggtcttatcacgtgcaaggcatttggtctatacaaatccattaatgtggaatatcgattcttggtaattaatagattaggtgcagatctagatgcggtgatcagagccaataataatagactaccaaaaaggtcggtgatgttgatcggaatcgaaatcttaaataccatacaatttatgcacgagcaaggatattctcacggagatattaaagcgagtaatatagtcttagatcaaatagataagaataaattatatctagtggattacggattggtttctaaattcatgtctaatggcgaacatgttccatttataagaaatccaaataaaatggataacggtactctagaatttacacctatagattcgcataaaggatacgttgtatctagacgtggagatctagaaacacttggatattgtatgattagatggttgggaggtatcttaccatggactaagatatctgaaacaaagaattgtgcattagtaagtgccacaaaacagaaatatgttaacaatactgcgactttgttaatgaccagtttgcaatatgcacctagagaattgctgcaatatattaccatggtaaactctttgacatattttgaggaacccaattacgacaagtttcggcacatattaatgcagggtgtatattattaagtgtggtgtttggtcgataaaaattaaaaaataacttaatttattattgatctcgtgtgtacaaccgaaatcatggcgatgttttacgcacacgctctcggtgggtacgacgagaatcttcatgcctttcctggaatatcatcgactgttgccaatgatgtcaggaaatattctgttgtgtcagtttataataacaagtatgacattgtaaaagacaaatatatgtggtgttacagtcaggtgaacaagagatatattggagcactgctgcctatgtttgagtgcaatgaatatctacaaattggaaatccgatccatgatcaagaaggaaatcaaatctctatcatcacatatcgccacaaaaactactatgctctaagcggaatcgggtacgagagtctagacttgtgtttggaaggagtagggattcatcatcacgtacttgaaacaggaaacgctgtatatggaaaagttcaacatgattattctactatcaaagagaaggccaaagaaatgagtgcacttagtccaggacctatcatcgattaccacgtctggataggagattgtatctgtcaagttactgctgtggacgtacatggaaaggaaattatgaaaatgagattcaaaaagggtgcggtgcttccgatcccaaatctggtaaaagttaaacttggggagaatgatacagaaaatctttcttctactatatcggcggcaccatcgaggtaaccacctctctggaagacagcgtgaatcatgtactcatgaaacgtttggaaactatacgccatatgtggtctgttgtatatgatcattttgatattgtgaatggtaaagaatgctgttatgtgcatacgcattcatctaatcaaaatcctataccgagtactgtaaaaacaaatttgtacatgaagactatgggatcatgcattcaaatggattccatggaagctctagagtatcttagcgaactgaaggaatcaggtggatggagtcccagaccagaaatgcaggaatttgaatatccagatggagtggaagacactgaatcaattgagagattggcagaggagttcttcaatagatcagaacttcaggctggtgaatcagtcaaatttggtaattctattaattgttaaacatacatctgtttcagctaagcaactaagaacacgtatacggcagcagcttccttctatactctcatcttttaccaacacaaagggtggatatttgttcattggagttgataataatacacacaaagtatttggattcacggtgggttacgactacctcagactgatagagaatgatatagaaaagcatatcaaaagacttcgtgttgtgcatttctgtgagaagaaagaggacatcaagtacgcgtgtcgattcatcaaggtatataaacctggggatgagactacctcgacatacgtgtgcgctatcaaagtggaaagatgctgttgtgctgtgtttgcagattggccagaatcatggtatatggatactaatggtatcaagaagtattctccagatgaatgggtgtcacatataaaattttaattaatgtaactatagagaacaaataataaggttgtaatatcatatagacaataactaacaattaattagtaactgttatctcttttttaactaaccaactaactatatacctattaatacatcgtaattatagttcttaacatctattaatcattaattcgcttctttaattttttataaactaacattgttaattgaaaagggataacatgttacagaatataaattatatatggatttttttaaaaaggaaatacttgactggagtatatatttatctcttcattatatagcacgcgtgttttccaatttttccacatcccatataatacaggattataatctcgttcgaacatacgagaaagtggataaaacaatagttgattttttatctaggttgccaaatttattccatattttagaatatggggaaaatattctacatatttattctatggatgatgctaatacgaatattataattttttttctagatagagtattaaatattaataagaacgggtcatttatacacaatctcgggttatcatcatccattaatataaaagaatatgtatatcaattagttaataatgatcatccagataataggataagactaatgcttgaaaatggacgtagaacaagacattttttgtcctatatatcagatacagttaatatctatatatgtattttaataaatcatggattttatatagatgccgaagacagttacggttgtacattattacatagatgtatatatcactataagaaatcagaatcagaatcatacaatgaattaattaagatattgttaaataatggatcagatgtagataaaaaagatacgtacggaaacacaccttttatcctattatgtaaacacgatatcaacaacgtggaattgtttgagatatgtttagagaatgctaatatagactctgtagactttaatagatatacacctcttcattatgtctcatgtcgtaataaatatgattttgtaaagttattaatttctaaaggagcaaatgttaatgcgcgtaataaattcggaactactccattttattgtggaattatacacggtatctcgcttataaaactatatttggaatcagacacagagttagaaatagataatgaacatatagttcgtcatttaataatttttgatgctgttgaatctttagattatctattatccagaggagttattgatattaactatcgtactatatacaacgaaacatctatttacgacgctgtcagttataatgcgtataatacgttggtctatctattaaacaaaaatggtgattttgagacgattactactagtggatgtacatgtatttcggaagcagtcgcaaacaacaacaaaataataatggaagtactattgtctaaacgaccatctttgaaaattatgatacagtctatgatagcaattactaaacataaacagcataatgcagatttattgaaaatgtgtataaaatatactgcgtgtatgaccgattatgatactcttatagatgtacagtcgctacagcaatataaatggtatattttaagatgtttcgatgaaatagatatcatgaagagatgttatataaaaaataaaactgtattccaattagttttttgtatcaaagacattaatactttaatgagatacggtaaacatccttctttcgtgaaatgcactagtctcgacgtatacggaagtcgtgtacgtaatatcatagcatctattagatatcgtcagagattaattagtctattatccaagaagctggatcctggagataaatggtcgtgttttcctaacgaaataaaatataaaatattggaaaactttaacgataacgaactatccacatatctaaaaatcttataaacattattaaaatataaaatctaagtaggataaaatcacactacatcattgtttccttttagtgctcgacagtgtatactatttttaacgctcataaataaaaatgaaaacgatttccgttgttacgttgttatgcgtactacctgctgttgtttattcaacatgtactgtacccactatgaataacgctaaattaacgtctaccgaaacatcgtttaatgataaccagaaagttacgtttacatgtgatcagggatatcattctttggatccaaatgctgtctgtgaaacagataaatggaaatacgaaaatccatgcaaaaaaatgtgcacagtttctgattatgtctctgaactatataataaaccgctatacgaagtgaattccaccatgacactaagttgcaacggcgaaacaaaatattttcgttgcgaagaaaaaaatggaaatacttcttggaatgatactgttacgtgtcctaatgcggaatgtcaacctcttcaattagaacacggatcgtgtcaaccagttaaagaaaaatactcatttggggaatatatgactatcaactgtgatgttggatatgaggttattggtgcttcgtacataagttgtacagctaattcttggaatgttattccatcatgtcaacaaaaatgtgatatgccgtctctatctaacggattaatttccggatctacattttctatcggtggcgttatacatcttagttgtaaaagtggttttacactaacggggtctccatcatccacatgtatcgacggtaaatggaatcccatactcccaatatgtgtacgaactaacgaaaaatttgatccagtggatgatggtcccgacgatgagacagatttgagcaaactctcgaaagacgttgtacaatatgaacaagaaatagaatcgttagaagcaacttatcatataatcatagtggcgttgacaattatgggcgtcatatttttaatctccgttatagtattagtttgttcctgtgacaaaaataatgaccaatataagttccataaattgctaccgtaaatataaatccgttaaaataattaataatttaataacaaacaagtatcaaaagattaaagacttatagctagaatcaattgagatgtcttcttcagtggatgttgatatctacgatgccgttagagcatttttactcaggcactattataacaagagatttattgtgtatggaagaagtaacgccatattacataatatatacaggctatttacaagatgcgccgttataccgttcgatgatatagtacgtactatgccaaatgaatcacgtgttaaacaatgggtgatggatacacttaatggtataatgatgaatgaacgcgatgtttctgtaagcgttggcaccggaatactattcatggaaatgtttttcgattacaataaaaatagtatcaacaatcaactaatgtatgatataattaatagcgtatctataattctagctaatgagagatatagaagcgcttttaacgacgatggtatatacatccgtagaaatatgattaacaagttgtacggatacgcatctctaactactattggcacgatcgctggaggtgtttgttattatctgttgatgcatctagttagtttgtataaataattatttcaatatactagttaaaattttaagattttaaatgtataaaaaactaataacgtttttatttgtaataggtgcattagcatcctattcgaataatgagtacactccgtttaataaactgagtgtaaaactctatatagatggagtagataatatagaaaattcatatactgatgataataatgaattggtgttaaattttaaagagtacacaatttctattattacagagtcatgcgacgtcggatttgattccatagatatagatgttataaacgactataaaattattgatatgtataccattgactcgtctactattcaacgcagaggtcacacgtgtagaatatctaccaaattatcatgccattatgataagtacccttatattcacaaatatgatggtgatgagcgacaatattctattactgcagagggaaaatgctataaaggaataaaatatgaaataagtatgatcaacgatgatactctattgagaaaacatactcttaaaattggatctacttatatatttgatcgtcatggacatagtaatacatattattcaaaatatgatttttaaaaatttaaaatatattatcacttcagtgacagtagtcaaataacaaacaacaccatgagatatattataattctcgcagttttgttcattaatagtatacatgctaaaataactagttataagtttgaatccgtcaattttgattccaaaattgaatggactggggatggtctatacaatatatcccttaaaaattatggcatcaagacgtggcaaacaatgtatacaaatgtaccagaaggaacatacgacatatccgcatttccaaagaatgatttcgtatctttctgggttaaatttgaacaaggcgattataaagtggaagagtattgtacgggactatgcgtcgaagtaaaaattggaccaccgactgtaacattgactgaatacgacgaccatatcaatttgtacatcgagcatccgtatgctactagaggtagcaaaaagattcctatttacaaacgcggtgacatgtgtgatatctacttgttgtatacggctaacttcacattcggagattctaaagaaccagtaccatatgatatcgatgactacgattgcacgtctacaggttgcagcatagactttgtcacaacagaaaaagtgtgcgtgacagcacagggagccacagaagggtttctcgaaaaaattactccatggagttcgaaagtatgtctgacacctaaaaagagtgtatatacatgcgcaattagatccaaagaagatgttcccaatttcaaggacaaaatggccagagttatcaagagaaaatttaatacacagtctcaatcttatttaactaaatttctcggtagcacatcaaatgatgttaccacttttcttagcatgcttaacttgactaaatattcataactaatttttattaatgatacaaaaacgaaataaaactgcatattatacactggttaacgcccttataggctctaaccattttcaagatgaggtccctgattatagtccttctgttcccctctatcatctactccatgtctattagacgatgtgagaagactgaagaggaaacatggggattgaaaatagggttgtgtataattgccaaagatttctatcccgaaagaactgattgcagtgttcatctcccaactgcaagtgaaggattgataactgaaggcaatggattcagggatatacgaaacaccgataaattataaaaaaagcaatgtgtccgctgtttccgttaataatactattttcgtaactggcggattattcataaataactctaatagcacgatcgtggttaacaatatggaaaaacttgacatttataaagacaaacaatggtcgattatagaaatgcctatggctagggtatatcacggcattgactcgacatttggaatgttatattttgccggaggtctatccgttaccgaacaatatggtaatttagagaaaaacaacgagatatcttgttacaatcctagaacgaataagtggtttgatatttcatatactatttataagatatccatatcatcattgtgtaaactaaataacgtcttctatgtatttagtaaggacattggatatgtggaaaagtatgatggtgcatggaagttagtacatgatcgtctccccgctataaaggcattatcaacttctccttattgattgaaaatgaaaatataaatagtttttatgtatagcagtattaccctatagttttattgcttactactaacatggatacagatgttacaaatgtagaagatatcataaatgaaatagatagagagaaagaagaaatactaaaaaatgtagaaattgaaaataataaaaacattaacaagaatcatcccaatgaatatattagagaagcactcgttattaataccagtagtaatagtgattccattgataaagaagttatagaatgtatcagtcacgatgtaggaatatagatcatatctactaatttttataatcgatacaaaacataaaaaacaactcgttattacatagcaggcatggaatccttcaagtattgttttgataacgatggcaagaaatggattatcggaaatactttatattctggtaattcaatactctataaggtcagaaaaaatttcactagttcgttctacaattacgtaatgaagatagatcacaaatcacacaagccattgttgtctgaaatacgattctatatatctgtattggatcctttgactatcgacaactggacacgggaacgtggtataaagtatttggctattccagatctgtatggaattggagaaaccgatgattatatgttcttcgttataaagaattcgggaagagtattcgccccaaaggatactgaatcagtcttcgaagcatgcgtcactatgataaacacgttagagtttatacactctcgaggatttacccatggaaaaatagaaccgaggaatatactgattagaaataaacgtctttcactaattgactattctagaactaacaaactatacaagagtggaaactcacatatagattacaacgaggacatgataacttcaggaaatatcaattatatgtgtgtagacaatcatcttggagcaacagtttcaagacgaggagatttagaaatgttgggatattgcatgatagaatggttcggtggcaaacttccatggaaaaacgaaagtagtataaaagtaataaaacaaaaaaaagaatataaaaaatttatagctactttctttgaggactgttttcctgaaggaaatgaacctctggaattagttagatatatagaattagtatacacgttagattattctcaaactcctaattatgacagactacgtaaactgtttatacaagattgaaattatattcttttttttatagagtgtggtagtgttacggatatctaatattaatattagactatctctatcgcgctacacgaccaatatcgattactatggatatcttctatgaaaggagagaatgtatttatttctccagcgtcaatctcgtcagtattgacaatactgtattatggagctaatggatccactgctgaacagctatcaaaatatgtagaaacggaggagaacacggataaggttagcgctcagaatatctcattcaaatccatgaataaagtatatgggcgatattctgccgtgtttaaagattcctttttgagaaaaattggcgataagtttcaaactgttgacttcactgattgtcgcactatagatgcaatcaacaagtgtgtagatatctttactgaggggaaaatcaatccactattggatgaaccattgtctcctagcaattagtgccgtatactttaaagcaaaatggttgacgccattcgaaaaggaatttaccagtgattatcccttttacgtatctccgacggaaatggtagacgtaagtatgatgtctatgtacggcaaggcatttaatcacgcatctgtaaaagaatcattcggcaacttttcaatcatagaactgccatatgttggagatactagtatgatggtcattcttccagacaagattgatggattagaatccatagaacaaaatctaacagatacaaattttaagaaatggtgtgactttatggatgctatgtttatagatgttcacattcccaagtttaaggtaacaggctcgtataatctggtggatactctagtaaagtcaggactgacagaggtgttcggttcaactggagattatagcaatatgtgtaatttagatgtgagtgtcgacgctatgatccacaaaacgtatatagatgtcaatgaagagtatacagaagcagctgcagcaacttctgtactagtggcagactgtgcatcaacaattacaaatgagttctgtgcagatcatccgttcatctatgtgattaggcatgttgatggaaaaattcttttcgttggtagatattgctctccgacaactaattgttaaccattttttttaaaaaaaatagaaaaaacatgtggtattagtgcaggtcgttgttcttccaattgcaattggtaagatgacggccaactttagtacccacgtcttttcaccacagcactgtggatgtgacagactgaccagtattgatgacgtcaaacaatgtttgactgaatatatttattggtcgtcctatgcataccgcaacaggcaatgcgctggacaattgtattccacactcctctcttttagagatgatgcggaattagtgttcatcgacattcgcgagctggtaaaaaatatgccgtgggatgatgtcaaagattgtacagaaatcatccgttgttatataccggatgagcaaaaaaccatcagagagatttcggccatcatcggactttgtgcatatgctgctacttactggggaggtgaagaccatcccactagtaacagtctgaacgcattgtttgtgatgcttgagatgctaaattacgtggattataacatcatattccggcgtatgaattgatgagttgtacatcttgacattttctttcttctcttctccctttcttctcttctcccttcctccctcttctccctttcccagaaacaaacttttttacccactataaaataaaatgagtatactacctattatatttcttcctatatttttttattcttcattcgttcagacttttaacgcgtctgaatgtatcgacaaagggcaatattttgcatcattcatggagttagaaaacgagccagtaatcttaccatgtcctcaaataaatacgctatcatccggatataatatattagatattttatgggaaaaacgaggagcggataatgatagaattataccgatagataatggtagcaatatgctaattctgaacccgacacaatcagactctggtatttatatatgcattaccacgaacgaaacctactgtgacatgatgtcgttaaatttgacaatcgtgtctgtctcagaatcaaatatagatcttatctcgtatccacaaatagtaaatgagagatctactggcgaaatggtatgtcccaatattaatgcatttattgctagtaacgtaaacgcagatattatatggagcggacatcgacgccttagaaataagagacttaaacaacggacacctggaattattaccatagaagatgttagaaaaaatgatgctggttattatacatgtgttttagaatatatatacggtggcaaaacatataacgtaaccagaattgtaaaattagaggtacgggatagaataataccttctactatgcaattaccagatggcattgtaacttcaataggtagtaatttgactattgcatgcagagtatcgttgagacctcccacaacggacaccgacgtcttttggataagtaatggtatgtattacgaagaagatgatggggacggaaacggtagaataagtgtagcaaataaaatctatatgaccgataagagacgtgttattacatcccggttaaacattaatcctgtcaaggaagaagatgctacaacgtttacgtgtatggcgtttactattcctagcatcagcaaaacagttactgttagtataacgtgaatgtatgttgttacatttccatgtcaattgagtttataagaatttttatacattatcttccaacaaacaattgacgaacgtattgctatgattaactcccacgatactatgcatattattaatcattaacttgcagactatacctagtgctattttgacatactcgtgttcttgtgtaattgcggtatctatattattaaagtacgtaaatctagctatagttttattatttaattttagataatataccgtctccttatttttaaaaattgccacatcctttattaaatcatgaatgggaatttctatgtcatcgttagtatattgtgaacaacaagagcagatatctataggaaagggtggaatgcgatacattgatctatgtagttttaaaacacacgcgaactttgaagaatttatataaatcattccatcgatacatccttctatgttgacatgtatatatccaggaattcttttattaatgtcaggaaatgtataaactaaaacattgcccgaaagcggtgcctctatctgcgttatatccgttcttaacttacaaaatgtaaccaatacctttgcatgacttgttttgttcggcaacgttagtttaaacttgacgaatggattaattacaatagcatgatccgcgcatctattaagtttttttactttaacgcccttgtatgtttttacagagactttatctaaatttctagtgcttgtatgtgttataaatataacgggatatagaaccgaatcacctaccttagatacccaattacattttatcagatccagataataaacaaattttgtcgccctaactaattctatattgttatatattttacaattggttatgatatcatgtaataacttggagtctaacgcgcatcgtcgtacgtttatacaattgtgatttagtgtagtatatctacacatgtatttttccgcactatagtattctggactagtgataaaactatcgttatatctgtcttcaatgaactcatcgagatattgctctctgtcatattcatacacctgcataaactttctagacatcttacaatccgtgttattttaggatcatatttacatatttacgggtatatcaaagatgttagattagttaatgggaatcgtctataataatgaatattaaacaattatatgaggacttttaccacaaagcatcataaaaatgagtcgtcgtctgatttatgttttaaatatcaaccgcaaatcaactcataaaatacaagagaatgaaatatatacatattttagtcattgcaatatagaccatacttctacagaacttgattttgtagttaaaaactatgatctaaacagacgacaacctgtaactgggtatactgcactacactgctatttgtataataattactttacaaacgatgtactgaagatattattaaatcatgacgtaaatgtaacgatgaaaaccagtagcggacgtatgcctgtttatatattgcttactagatgttgtaatatttcacatgatgtagtgatagatatgatagacaaagataaaaaccacttattacatagagactattccaacctattactagagtatataaaatctcgttacatgttattgaaggaagaggatatcgatgagaacatagtatccactttattagataagggaatcgatcctaactttaaacaagacggatatacagcgttacattattattatttgtgtctcgcacacgtttataaactaggtgagtgtagaaaaccgataacgataaaaaaggccaagcgaattatttctttgtttatacaacatggagctaatctaaacgcgttagataattgtggtaatacaccattccatttgtatcttagtattgaaatgtgtaataatattcatatgactaaaatgctgttgacttttaatccgaatttcaaaatatgtaataatcatggattaacgcctatactatgttatataacttccgactacatacaacacgatattcttgttatgttaatacatcactatgaaacaaatgttggagaaatgccgatagatgagcgtcgtatgatcgtattcgagtttatcaaaacatattctacacgtccggcagattcgataacttatttgatgaataggtttaaaaatataaatatttatacccgctatgaaggaaagacattattacacgtagcatgtgaatataataatacacaagtaatagattatcttatacgtatcaacggagatataaatgcgttaaccgacaataacaaacacgctacacaactcattatagataacaaagaaaattccccatataccattaattgtttactgtatatacttagatatattgtagataagaatgtgataagatcgttggtggatcaacttccatctctacctatcttcgatataaaatcatttgagaaattcatatcctactgtatacttttagatgacacattttacgataggcacgttaagaatcgcgattctaaaacgtatcgatacgcattttcaaaatacatgtcgtttgataaatacgatggtataataactaaatgtcacgacgaaacaatgttactcaaactgtccactgttctagacactacactatatgcagttttaagatgtcataattcgagaaagttaagaagatacctcaacgagttaaaaaaatataataacgataagtcctttaaaatatattctaatattatgaatgagagataccttaatgtatattataaagatatgtacgtgtcaaaggtatatgataaactatttcctgttttcacagataaaaattgtctactaacattactaccttcagaaattatatacgaaatattatacatgctgacaattaacgatctttataatatatcgtatccacctaccaaagtatagttgtatttttctcatgcgatgtgtgtaaaaaaactgatattatataaatattttagtgccgtataataaagatgacgatgaaaatgatggtacatatatatttcgtatcattattgttattgctattccacagttacgccatagacatcgaaaatgaaatcacagaattcttcaataaaatgagagatactctaccagctaaagactctaaatggttgaatccagcatgtatgttcggaggcacaatgaatgatatagccgctctaggagagccattcagcgcaaagtgtcctcctattgaagacagtcttttatcgcacagatataaagactatgtggttaaatgggagaggctagaaaagaatagacggcgacaggtttctaataaacgtgttaaacatggtgatttatggatagccaactatacatctaaattcagtaaccgtaggtatttgtgcaccgtaactacaaagaatggtgactgtgttcagggtatagttagatctcatattaaaaaacctccttcatgcattccaaaaacatatgaactaggtactcatgataagtatggcatagacttatactgtggaattctttacgcaaaacattataataatataacttggtataaagataataaggaaattaatatcgacgacattaagtattcacaaacgggaaaggaattaattattcataatccagagttagaagatagcggaagatacgactgttacgttcattacgacgacgttagaatcaagaatgatatcgtagtatcaagatgtaaaatacttacggttataccgtcacaagaccacaggtttaaactaatactagatccgaaaatcaacgtaacgataggagaacctgccaatataacatgcactgctgtgtcaacgtcattattgatcgacgatgtactgattgaatgggaaaatccatccggatggcttataggattcgattttgatgtatactctgttttaactagtagaggcggtatcaccgaggcgaccttgtactttgaaaatgttactgaagaatatataggtaatacatataaatgtcgtggacacaactattattttgaaaaaacccttacaactacagtagtattggagtaaatatacaatgcatttttatatacattactgaattattattactgaattattattactgaattattattaattatatcgtatttgtgctatagaatggatgaagatacgcgactatctaggtatttgtatctcaccgatagagaacatataaatgtagactctattaaacagttgtgtaaaatatcagatcctaatgcatgttatagatgtggatgtacggctttacatgagtacttttataattatagatcagtcaacggaaaatacaagtatagatacaacggttactatcaatattattcatctagcgattatgaaaattataatgaatattattatgatagaactggtatgaacagtgagagtgataatatatcaatcaaaacagaatatgaattctatgatgaaacacaagatcaaagtacacaactagtaggttacgacattaaactcaaaaccaatgaggatgattttatggctatgatagatcagtgggtgtccatgattatatagatgaatcaattaataaagtagtatatggaagagagtctcacgtaagatggcgggatatatggcaagaacataatgatggcgtatacagtataggaaaggagtgcatagataatatatacgaagacaaccataccgtagacgaattctacaagatagacagcgtatcagatgtagatgacgcggaacacatatctccgataactaaaaaaccatagaatcagttgatgataatacctacatttctaatcttccgtataccatcaaatacaaaatattcgagcaacaataagtattttttatacctttaaaactgataaataaattttttctagtgatattttggcaagatgagaatcctatttctcatcgctttcatgtatgggtgtgttcactcatatgttaacgcggttgaaaccaaatgtccaaatctagacattgtaacatcttctggagaatttcattgttcaggatgtgtggaacatatgcctgagtttagctatatgtattggttggcaaaggatatgaaatcggacgaggataccaagtttatagaacatctgggtgatggcatcaaagaagatgaaaccgttcgtaccacagatagtggaatcgtcactctacgtaaagtccttcatgtgactgatactaataaatttgataattataggttcacttgtgtcctcgctacgctagatggcatttataaaaagaatgtttgctgaagtagttgtgtgctactatttttatttatgatataatctaatggaattaatttgaattgatatttatccaatactaaagattatattagaatcaaattaatcttttatacgagaaaaaataacgacatacgtcgtcaacaaattaaactttttatttattagttaactagcttatagaacttgctcattgttatgtttctaaaacgggtacggcatataggacaattatccgacgcaccggtttctcttcgtgttctatgccatatattgatgcatgttatgcaaaatatatgagtacacgaatccaataaaccaaagtatctatcgttttgagtaaacaacttcatagcaaattccacattctttttctttacttactctatacacgtcctcgtatttatttagtattttgatgatatccaactcagaaatggttgttgtattattgggtgtatttggagtataggtattattagctatgtaccaatttaccaaccctcttaatattgattgataatcacatcggttatccaattaataactaaattgtagtgtatatatagaccatatatgtttctatttttttgacagttacgtatagtttcagtaagttttgattgttgtattcctgtatctctagataagttagtcatatagtcccttccggcgatacgttttttccaagcccgaaattgattagccaaatgtgtatttatttttgtgatattgatataatatttcggataatgcatactgttagtcttatatcatttggttcatctatgtattgtaatattgttacatgatctatagatgatgtattgattttggcaggatcgaattccatatccgcgactaaacagtgaaaaaaatgtaaatactttttaaattttaaattagtaaaacttttttttattttttatgattccaaaaatactgaatacaaagtcctaaattataaatatggagatcatactaccacaacttattattatgtatacaaggccggtgtaatagatagatatatataattctattacaccggcagacaattaccgaccggtatttgtcgttaccaacataccgtataatatgtaatatacaattccataacccattgacagttgttatacatcaaaattgcaattcttttgattacgatgttataagaatgtagttaattgatgtatgatgttaatgtgtcctctttcctcttataacatcgtaatcaaaaacttttttataatatatacctaataatgtgtcttaatagttctcgtgattcgtcaaacaatcattcttataaaatataataaagcaacgtaaaaacacataaaaataagcgtaactaataagacaatggatatttacgacgataaaggtctacagactattaaactgtttaataatgaatttgattgtataaggaatgacatcagagaattatttaaacatgtaactgattccgatagtatacaacttccgatggaagacaattctgatattatagaaaatatcagaaaaatactatatagacgattaaaaaatgtagaatgtgttgacatcgataacacaataacttttatgaaatacgatccaaatgatgataataagcgtacgtgttctaattgggtacccttaactaataactatatggaatattgtctagtaatatatttggaaacaccgatatgtggaggcaaaataaaattataccaccctacaggaaatataaagtcggataaggatattatgtttgcaaagactctagactttaaatcaacgaaagtgttaactggacgtaaaacaattgccgttctagacatatccgtttcatataatagatcaatgactactattcactacaacgacgacgttgatatagatatacatactgataaaaatggaaaagagttatgttattgttatataacaatagatgatcattacttggttgatgtggaaactataggagttatagtcaatagatctggaaaatgtctgttagtaaataaccatctaggtataggtatcgttaaagataaacgtataagcgatagttttggagatgtatgtatggatacaatatttgacttttctgaagcacgagagttattttcattaactaatgatgataacaggaatatagcatgggacactgataaactagacgatgatacagatatatggactcccgtcacagaagatgattacaaatttctttctagactagtattgtatgcaaaatctcaatcggatactgtatttgactattatgttcttactggtgatacggaaccacccactgtattcattttcaaggtaactagattttactttaatatgccgaaataaaaaatttttgtataatatctagaggtagaggtattgtttagataaatacaaataacatagatacatcgcatacttagcatttttataaatatacataagacatacactttatacatttttgtaaaaatactcataaaaaaatttataaaaattatggcacaaccatatcttgtataggtagtttagttcgtcgagtgaacctataaacagataatagacaacacataataatgcctactaatacaagcataataccgggagatgggatatatgacgttgtagtgtttgggttttctgaacgttgatagtctactaatactacatgctgacatctaatgcctgtataaccatgagagcatctacaatacataccgtcaatatctctagcgtggatacagtcaccgtgtaaacaatatccatctccctctggaccgcataatctgatagctggaatatctgttgtagcgtttgtaatttctggcaatgtcgtttcgatagcgttaccactatcggcgaatgatctgattatcatagcagcgaacaacaacatcagataatttatcaacatttttgatggattctgtgtttatgctgtttctcagtgtgtgtttatgacaagattgggaattttatattattaattcagtaatataaactaataatatattgttaattgtgtaaataatataaaaataacaatacaatattgaatgtgttgctgttaaaaatgtatgtgttaatataatagaataaaataaatgagtatgatcattttagataacgattgattttatcattaccgcttcattcttatattctttgcttacggaacctatatttagaaacatctactaacaattttttatgcttgcattattaatggtatgtaatatgattgattgtgtacgcaataccaatttgttaagtatgaatacggggtacaaacataaattgaaatttaacattatttatttatgatatatatcgttatcgttaggtctataccatggatatctttaaagaactaatcttaaaacaccctgatgaaaatgttttgatttctccagtttccattttatctactttatctattctaaatcatggagcagctggttctacagctgaacaactatcaaaatatatagagaatatgaatgagaatacacccgatgacaataatgatgacatggaggtagatattccgtattgtgcgacactagctaccgcaaataaaatatacggtagcgatagtatcgagttccacgcctccttcctacaaaaaataaaagacgattttcaaactgtaaactttaataatgctaaccaaacaaaggaactaatcaacgaatgggttaagacaatgacaaatggtaaaattaattccttattgactagtccgctatccattaatactcgtatgacagttgttagcgccgtccattttaaagcaatgtggaaatatccattttctaaacatcttacatatacagacaagttttatatttctaagaatatagttaccagcgttgatatgatggtgggtaccgagaataacttgcaatatgtacatattaatgaattattcggaggattctctattatcgatattccatacgagggaaactctagtatggtaattatactaccggacgacatagaaggtatatataacatagaaaaaaatataacagatgaaaaatttaaaaaatggtgtggtatgttatctactaaaagtatagacttgtatatgccaaagtttaaagtggaaatgacagaaccgtataatctggtaccgattttagaaaatttaggacttactaatatattcggatattatgcagattttagcaagatgtgtaatgaaactatcactgtagaaaaatttctacatacgacgtttatagatgttaatgaggagtatacagaagcatcggccgttacaggagtatttacgattaacttttcgatggtatatcgtacgaaggtctacataaaccatccattcatgtacatgattaaagacaccacaggacgtatactttttatagggaaatactgctatccgcaataaatataaacaaatagacttttataaagagtcttcaacgataagtatatcgacatactacttatgctgcgaaagattctgaacgagaacgactatctcaccctcttggatcatatccgcactgctaaatactaaatctccactacactttttatcatcttatgaggaatgattgccttcgtgaaataggaataattagcaccagaatagctatggattattgtggtagagagtgcactattctatgtcgtctactggatgaagatgtgacgtacaaaaaaataaaactagaaattgaaacgtgtcacaacttatcaaaacatatagatagacgaggaaacaatgcgctacattgttacgtctccaataaatgcgatacagacattaagattgttctctcgcggagtcgagagactttgtagaaacaacgaaggattaactccgctaggagtatacagtaagcatagatacgtaaaatctcagattgtgcatctactgatatccagctattcaaattcctctaacgaactcaagtcgaatataaatgatttcgatctgtattcggataatatcgacttacgtctgctaaaatacctaattgtggataaacggatacgtccgtccaagaatacgaattatgcaatcaatggtctcggattggtggatatatacgtaacgacgcctaatccgagaccagaagtattgctatggcttcttaaatcagaatgttacagcaccggttacgtatttcgtacctgtatgtacgacagtgatatgtgtaagaactctcttcattactatatatcgtctcatagagaatctcaatctctatccaaggatgtaattaaatgtttgatcgataacaatgtttccatccatggcagagacgaaggaggatctttacccatccaatactactggtctttctcaaccatagatatagagattgttaaattattattaataaaggatgtggacacgtgtagagtatacgacgtcagccctatattagaggcgtattatctaaacaagcgatttagagtaaccccatataatgtagacatggaaatcgttaatcttcttattgagagacgtcatactcttgtcgacgtaatgcgtagtattacttcgtacgattccagagaatataaccactacatcatcgataacattctaaagagatttagacaacaggatgaatccatcgtacaagccatactgataaactacttacattacggcgatatggtcgttcgatgcatgttagataacggacaacaactatcctctacacgactactttgttaataataatctcgtcgatgtaaacgtcgtaaggtttatcgtggaaaatatggacacgcggctgtaaatcacgtatcgaacaatggccgtctatgtatgtacggtctgatattatcgagatttaataattgcgggtatcactgttatgaaaccatactgatagatgtatttgatatactaagcaagtacatggatgatatagatatgatcgataactctactatattacgcggtcgatgtcaataatatacaatttgcaaagcggttattggaatatggagcgagtatcacgctcgataatcaatacggccatccagaaaagcagttacagaagagaaaacaaaacgaaatcgttgttctacaagatgtctctccctacgacgattactacgtaaaaaagatactagcctactgcctattaagggacgagtcattcgcggaactacatagtaaattctgtttaaacgaggactataaaagtgtatttatgaaaaatatatcattcgataagatagattccatcatcgtgacataagtcgcctcaaagagattcgaatctccgacaccgacctgtatacggtatcacagctatcttaaagccatacattcagacagtcacatttcatttcccatgtacgacgatctcatagaacagtgccatctatcgatggagcgtaaaagtaaactcgtcgacaaagcactcaataaattagagtctaccatcggtcaatctagactatcgtatttgcctccggaaattatgcgcaatatcatctaaacagtatgttgtacggaaagaaccattacaaatattatccatgatagaaagaaaatatctatatgattggagaagtaggaaacaggaacaagacaacgattactacattattaaatcatgaagtccgtattatactcgtatatattgtttctctcatgtataataataaacggaagagatatagcaccgcatgcaccatccgatggaaagtgtaaagacaacgaatacaaacgccataatttgtgtccgggaacatacgcttccagattatgcgatagcaagactaacacacgatgtacgccgtgtggttcgggtaccttcacatctcgcaataatcatttacccgcttgtctaagttgtaacggaagacgcgatcgtgtaacacgactcacaatagaatctgtgaatgctctcccggatattattgtcttctcaaaggatcatccggatgcaaggcatgtgtttcccaaacaaaatgtggaataggatacggagtatccggagacgtcatctgttctccgtgtggtctcggaacatattctcacaccgtctcttccgcagataaatgcgaacccgtacccagaaatacgtttaactatatcgatgtggaaattaacctgtatccagttaacgacacgtcgtgtactcggacgaccactaccggtctcagcgaatccatctcaacgtcggaactaactattactatgaatcataaagactgtaatcccgtatttcgtgatggatacttctccgttcttaataaggtagcgacttcaggtttctttacaggagaaaggtgtgcactctgaatttcgagattaaatgcaataacaaagattcttcctccaaacagttaacgaaagcaaagaatgatactatcatgccgcattcggagacagtaactctagtgggcgacatctatatactatatagtaataccaatactcaagactacgaaactgatacaatctcttatcatgtgggtaatgttctcgatgtcgatagccatatgcccggtagttgcgatatacataaactgatcactaattccaaacccacccactttttatagtaagtttttcacccataaataataaatacaataattaatttctcgtaaaagtagaaaatatattctaatttattgcacggtaaggaagtagaatcataaagaacagtactcaatcaatagcaattatgaaacaatatatcgtcctggcatgcatgtgcctggcggcagctgctatgcctgccagtcttcagcaatcatcctcatcctcctcctcgtgtacggaagaagaaaacaaacatcatatgggaatcgatgttattatcaaagtcacaaagcaagaccaaacaccgaccaatgataagatttgccaatccgtaacggaaattacagagtccgagtcagatccagatcccgaggtggaatcagaagatgattccacatcagtcgaggatgtagatcctcctaccacttattactccatcatcggtggaggtctgagaatgaactttggattcaccaaatgtcctcagattaaatccatctcagaatccgctgatggaaacacagtgaatgctagattgtccagcgtgtccccaggacaaggtaaggactctcccgcgatcactcatgaagaagctcttgctatgatcaaagactgtgaagtgtctatcgacatcagatgtagcgaagaagagaaagacagcgacatcaagacccatccagtactcgggtctaacatctctcataagaaagtgagttacgaagatatcatcggttcaacgatcgtcgatacaaaatgcgtcaagaatctagagtttagcgttcgtatcggagacatgtgcaaggaatcatctgaacttgaggtcaaggatggattcaagtatgtcgacggatcggcatctgaaggtgcaaccgatgatacttcactcatcgattcaacaaaactcaaagcgtgtgtctgaatcgataactctattcatctgaaattggatgagtagggttaatcgaacgattcaggcacaccacgaattaaaaaagtgtaccggacactatattccggtttgcaaaacaaaaatgttcttaactacattcacaaaaagttacctctcgcgacttcttctttttctgtctcaatagtgtgatacgattatgacactattcctattcctattcctatttcctttcagagtatcacaaaaatattaaacctctttctgatggtctcataaaaaaagttttacaaaaatatttttattctctttctctctttgatggtctcataaaaaaagttttacaaaaatatttttattctctttctctctttgatggtctcataaaaaaagttttacaaaaatatttttattctctttctctctttgatggtctcataaaaaaagttttacaaaaatatttttattctctttctctctttgatggtctcataaaaaaagttttacaaaaatatttttattctctttctctctttgatggtctcataaaaaaagttttacaaaaatatttttattctctttctctctttgatggtctcataaaaaaagttttacaaaaatatttttattctctttctctctttgatggtctcataaaaaaagttttacaaaaatatttttattctctttctctctttgatggtctcataaaaaaagttttacaaaaatatttttattctctttctctctttgatggtctcataaaaaaagttttacaaaaatatttttattctctttctctctttgatggtctcataaaaaaagttttacaaaaatatttttattctctttctctctttgatggtctcataaaaaaagttttacaaaaatatttttattctctttctctctttgatggtctcataaaaaagttttacaaaaatatttttattctctttctctctttgatggtctcataaaaaagttttacaaaaatatttttattctctttctctctttgatggtctcataaaaaaagttttacaaaaatatttttattctctttctctctttgatggtctcataa

SEQ ID NO: 18 - DNA, 201871 bp, Artificial Sequence
  GLV-1h330
ttatgagaccatcaaagagagaaagagaataaaaatatttttgtaaaactttttttatgagaccatcaaagagagaaagagaataaaaatatttttgtaaaacttttttatgagaccatcaaagagagaaagagaataaaaatatttttgtaaaacttttttatgagaccatcaaagagagaaagagaataaaaatatttttgtaaaactttttttatgagaccatcaaagagagaaagagaataaaaatatttttgtaaaactttttttatgagaccatcaaagagagaaagagaataaaaatatttttgtaaaactttttttatgagaccatcaaagagagaaagagaataaaaatatttttgtaaaactttttttatgagaccatcaaagagagaaagagaataaaaatatttttgtaaaactttttttatgagaccatcaaagagagaaagagaataaaaatatttttgtaaaactttttttatgagaccatcaaagagagaaagagaataaaaatatttttgtaaaactttttttatgagaccatcaaagagagaaagagaataaaaatatttttgtaaaactttttttatgagaccatcaaagagagaaagagaataaaaatatttttgtaaaactttttttatgagaccatcaaagagagaaagagaataaaaatatttttgtaaaactttttttatgagaccatcaaagagagaaagagaataaaaatatttttgtaaaactttttttatgagaccatcaaagagagaaagagaataaaaatatttttgtaaaactttttttatgagaccatcagaaagaggtttaatatttttgtgatactctgaaaggaaataggaataggaataggaatagtgtcataatcgtatcacactattgagacagaaaaagaagaagtcgcgagaggtaactttttgtgaatgtagttaagaacatttttgttttgcaaaccggaatatagtgtccggtacacttttttaattcgtggtgtgcctgaatcgttcgattaaccctactcatccaatttcagatgaatagagttatcgattcagacacacgctttgagttttgttgaatcgatgagtgaagtatcatcggttgcaccttcagatgccgatccgtcgacatacttgaatccatccttgacctcaagttcagatgattccttgcacatgtctccgatacgaacgctaaactctagattcttgacgcattttgtatcgacgatcgttgaaccgatgatatcttcgtaactcactttcttatgagagatgttagacccgagtactggatgggtcttgatgtcgctgtctttctcttcttcgctacatctgatgtcgatagacacttcacagtctttgatcatagcaagagcttcttcatgagtgatcgcgggagagtccttaccttgtcctggggacacgctggacaatctagcattcactgtgtttccatcagcggattctgagatggatttaatctgaggacatttggtgaatccaaagttcattctcagacctccaccgatgatggagtaataagtggtaggaggatctacatcctcgactgatgtggaatcatcttctgattccacctcgggatctggatctgactcggactctgtaatttccgttacggattggcaaatcttatcattggtcggtgtttggtcttgctttgtgactttgataataacatcgattcccatatgatgtttgttttcttcttccgtacacgaggaggaggatgaggatgattgctgaagactggcaggcatagcagctgccgccaggcacatgcatgccaggacgatatattgtttcataattgctattgattgagtactgttctttatgattctacttccttaccgtgcaataaattagaatatattttctacttttacgagaaattaattattgtatttattatttatgggtgaaaaacttactataaaaagtgggtgggtttggaattagtgatcagtttatgtatatcgcaactaccgggcatatggctatcgacatcgagaacattacccacatgataagagattgtatcagtttcgtagtcttgagtattggtattactatatagtatatagatgtcgcccactagagttactgtctccgaatgcggcatgatagtatcattctttgctttcgttaactgtttggaggaagaatctttgttattgcatttaatctcgaaattcagagtgcacacctttctcctgtaaagaaacctgaagtcgctaccttattaagaacggagaagtatccatcacgaaatacgggattacagtctttatgattcatagtaatagttagttccgacgttgagatggattcgctgagaccggtagtggtcgtccgagtacacgacgtgtcgttaactggatacaggttaatttccacatcgatatagttaaacgtatttctgggtacgggttcgcatttatctgcggaagagacggtgtgagaatatgttccgagaccacacggagaacagatgacgtctccggatactccgtatcctattccacattttgtttgggaaacacatgccttgcatccggatgatcctttgagaagacaataatatccgggagagcattcacagattctattgtgagtcgtgttacacgatcgcgtcttccgttacaacttagacaagcgggtaaatgattattgcgagatgtgaaggtacccgaaccacacggcgtacatcgtgtgttagtcttgctatcgcataatctggaagcgtatgttcccggacacaaattatggcgtttgtattcgttgtctttacactttccatcggatggtgcatgcggtgctatatctcttccgtttattattatacatgagagaaacaatatatacgagtataatacggacttcatgatttaataatgtagtaatcgttgtcttgttcctgtttcctacttctccaatcatatagatattttctttctatcatggataatatttgtaatggttctttccgtacaacatactgtttagatgatattgcgcataatttccggaggcaaatacgatagtctagattgaccgatggtagactctaatttattgagtgctttgtcgacgagtttacttttacgctccatcgatagatggcactgttctatgagatcgtcgtacatgggaaatgaaatgtgactgtctgaatgtatggctttaagatagctgtgataccgtatacaggtcggtgtcggagattcgaatctctttgaggcgacttatgtcacgatgatggaatctatcttatcgaatgatatatttttcataaatacacttttatagtcctcgtttaaacagaatttactatgtagttccgcgaatgactcgtcccttaataggcagtaggctagtatcttttttacgtagtaatcgtcgtagggagagacatcttgtagaacaacgatttcgttttgttttctcttctgtaactgcttttctggatggccgtattgattatcgagcgtgatactcgctccatattccaataaccgctttgcaaattgtatattattgacatcgaccgcgtaatatagtagagttatcgatcatatctatatcatccatgtacttgcttagtatatcaaatacatctatcagtatggtttcataacagtgatacccgcaattattaaatctcgataatatcagaccgtacatacatagacggccattgttcgatacgtgatttacagccgcgtgtccatattttccacgataaaccttacgacgtttacatcgacgagattattattaacaaagtagtcgtgtagaggatagttgttgtccgttatctaacatgcatcgaacgaccatatcgccgtaatgtaagtagtttatcagtatggcttgtacgatggattcatcctgttgtctaaatctctttagaatgttatcgatgatgtagtggttatattctctggaatcgtacgaagtaatactacgcattacgtcgacaagagtatgacgtctctcaataagaagattaacgatttccatgtctacattatatggggttactctaaatcgcttgtttagataatacgcctctaatatagggctgacgtcgtatactctacacgtgtccacatcctttattaataataatttaacaatctctatatctatggttgagaaagaccagtagtattggatgggtaaagatcctccttcgtctctgccatggatggaaacattgttatcgatcaaacatttaattacatccttggatagagattgagattctctatgagacgatatatagtaatgaagagagttcttacacatatcactgtcgtacatacaggtacgaaatacgtaaccggtgctgtaacattctgatttaagaagccatagcaatacttctggtctcggattaggcgtcgttacgtatatatccaccaatccgagaccattgattgcataattcgtattcttggacggacgtatccgtttatccacaattaggtattttagcagacgtaagtcgatattatccgaatacagatcgaaatcatttatattcgacttgagttcgttagaggaatttgaatagctggatatcagtagatgcacaatctgagattttacgtatctatgcttactgtatactcctagcggagttaatccttcgttgtttctacaaagtctctcgactccgcgagagaacaatcttaatgtctgtatcgcatttattggagacgtaacaatgtagcgcattgtttcctcgtctatctatatgttttgataagttgtgacacgtttcaatttctagttttatttttttgtacgtcacatcttcatccagtagacgacatagaatagtgcactctctaccacaataatccatagctattctggtgctaattattcctatttcacgaaggcaatcattcctcataagatgataaaaagtgtagtggagatttagtatttagcagtgcggatatgatccaagagggtgagatagtcgttctcgttcagaatctttcgcagcataagtagtatgtcgatatacttatcgttgaagactctttataaaagtctatttgtttatatttattgcggatagcagtatttccctataaaaagtatacgtcctgtggtgtctttaatcatgtacatgaatggatggtttatgtagaccttcgtacgatataccatcgaaaagttaatcgtaaatactcctgtaacggccgatgcttctgtatactcctcattaacatctataaacgtcgtatgtagaaatttttctacagtgatagtttcattacacatcttgctaaaatctgcataatatccgaatatattagtaagtcctaaattttctaaaatcggtaccagattatacggttctgtcatttccactttaaactttggcatatacaagtctatacttttagtagataacataccacaccattttttaaatttttcatctgttatatttttttctatgttatatataccttctatgtcgtccggtagtataattaccatactagagtttccctcgtatggaatatcgataatagagaatcctccgaataattcattaatatgtacatattgcaagttattctcggtacccaccatcatatcaacgctggtaactatattcttagaaatataaaacttgtctgtatatgtaagatgtttagaaaatggatatttccacattgctttaaaatggacggcgctaacaactgtcatacgagtattaatggatagcggactagtcaataaggaattaattttaccatttgtcattgtcttaacccattcgttgattagttcctttgtttggttagcattattaaagtttacagtttgaaaatcgtcttttattttttgtaggaaggaggcgtggaactcgatactatcgctaccgtatattttatttgcggtagctagtgtcgcacaatacggaatatctacctccatgtcatcattattgtcatcgggtgtattctcattcatattctctatatattttgatagttgttcagctgtagaaccagctgctccatgatttagaatagataaagtagataaaatggaaactggagaaatcaaaacattttcatcagggtgttttaagattagttctttaaagatatccatggtatagacctaacgataacgatatatatcataaataaataatgttaaatttcaatttatgtttgtaccccgtattcatacttaacaaattggtattgcgtacacaatcaatcatattacataccattaataatgcaagcataaaaaattgttagtagatgtttctaaatataggttccgtaagcaaagaatataagaatgaagcggtaatgataaaatcaatcgttatctaaaatgatcatactcatttattttattctattatattaacacatacatttttaacagcaacacattcaatattgtattgttatttttatattatttacacaattaacaatatattattagtttatattactgaattaataatataaaattcccaatcttgtcataaacacacactgagaaacagcataaacacagaatccatcaaaaatgttgataaattatctgatgttgttgttcgctgctatgataatcagatcattcgccgatagtggtaacgctatcgaaacgacattgccagaaattacaaacgctacaacagatattccagctatcagattatgcggtccagagggagatggatattgtttacacggtgactgtatccacgctagagatattgacggtatgtattgtagatgctctcatggttatacaggcattagatgtcagcatgtagtattagtagactatcaacgttcagaaaacccaaacactacaacgtcatatatcccatctcccggtattatgcttgtattagtaggcattattatgtgttgtctattatctgtttataggttcactcgacgaactaaactacctatacaagatatggttgtgccataatttttataaatttttttatgagtatttttacaaaaatgtataaagtgtatgtcttatgtatatttataaaaatgctaagtatgcgatgtatctatgttatttgtatttatctaaacaatacctctacctctagatattatacaaaaattttttatttcggcatattaaagtaaaatctagttaccttgaaaatgaatacagtgggtggttccgtatcaccagtaagaacataatagtcaaatacagtatccgattgagattttgcatacaatactagtctagaaagaaatttgtaatcatcttctgtgacgggagtccatatatctgtatcatcgtctagtttatcagtgtcccatgctatattcctgttatcatcattagttaatgaaaataactctcgtgcttcagaaaagtcaaatattgtatccatacatacatctccaaaactatcgcttatacgtttatctttaacgatacctatacctagatggttatttactaacagacattttccagatctattgactataactcctatagtttccacatcaaccaagtaatgatcatctattgttatataacaataacataactcttttccatttttatcagtatgtatatctatatcaacgtcgtcgttgtagtgaatagtagtcattgatctattatatgaaacggatatgtctagaacggcaattgttttacgtccagttaacactttcgttgatttaaagtctagagtctttgcaaacataatatccttatccgactttatatttcctgtagggtggtataattttattttgcctccacatatcggtgtttccaaatatattactagacaatattccatatagttattagttaagggtacccaattagaacacgtacgcttattatcatcatttggatcgtatttcataaaagttattgtgttatcgatgtcaacacattctacattttttaatcgtctatatagtatttttctgatattttctataatatcagaattgtcttccatcggaagttgtatactatcggaatcagttacatgtttaaataattctctgatgtcattccttatacaatcaaattcattattaaacagtttaatagtctgtagacctttatcgtcgtaaatatccattgtcttattagttacgcttatttttatgtgtttttacgttgctttattatattttataagaatgattgtttgacgaatcacgagaactattaagacacattattaggtatatattataaaaaagtttttgattacgatgttataagaggaaagaggacacattaacatcatacatcaattaactacattcttataacatcgtaatcaaaagaattgcaattttgatgtataacaactgtcaatgggttatggaattgtatattacatattatacggtatgttggtaacgacaaataccggtcggtaattgtctgccggtgtaatagaattatatatatctatctattacaccggccttgtatacataataataagttgtggtagtatgatctccatatttataatttaggactttgtattcagtatttttggaatcataaaaaataaaaaaaagttttactaatttaaaatttaaaaagtatttacatttttttcactgtttagtcgcggatatggaattcgatcctgccaaaatcaatacatcatctatagatcatgtaacaatattacaatacatagatgaaccaaatgatataagactaacagtatgcattatccgaaatattatatcaatatcacaaaaataaatacacatttggctaatcaatttcgggcttggaaaaaacgtatcgccggaagggactatatgactaacttatctagagatacaggaatacaacaatcaaaacttactgaaactatacgtaactgtcaaaaaaatagaaacatatatggtctatatatacactacaatttagttattaattggataaccgatgtgattatcaatcaatattaagagggttggtaaattggtacatagctaataatacctatactccaaatacacccaataatacaacaaccatttctgagttggatatcatcaaaatactaaataaatacgaggacgtgtatagagtaagtaaagaaaaagaatgtggaatttgctatgaagttgtttactcaaaacgatagatactttggtttattggattcgtgtactcatatattttgcataacatgcatcaatatatggcatagaacacgaagagaaaccggtgcgtcggataattgtcctatatgccgtacccgttttagaaacataacaatgagcaagttctataagctagttaactaataaataaaaagtttaatttgttgacgacgtatgtcgttattttttctcgtataaaagattaatttgattctaatataatctttagtattggataaatatcaattcaaattaattccattagattatatcataaataaaaatagtagcacacaactacttcagcaaacattctttttataaatgccatctagcgtagcgaggacacaagtgaacctataattatcaaatttattagtatcagtcacatgaaggactttacgtagagtgacgattccactatctgtggtacgaacggtttcatcttctttgatgccatcacccagatgttctataaacttggtatcctcgtccgatttcatatcctttgccaaccaatacatatagctaaactcaggcatatgttccacacatcctgaacaatgaaattctccagaagatgttacaatgtctagatttggacatttggtttcaaccgcgttaacatatgagtgaacacacccatacatgaaagcgatgagaaataggattctcatcttgccaaaatatcactagaaaaaatttatttatcagttttaaaggtataaaaaatacttattgttgctcgaatattttgtatttgatggtatacggaagattagaaatgtaggtattatcatcaactgattctatggttttatgtattctatcatgtttcactattgcgttggaaataatatcatatgcttccacatatattttattttgttttaactcataatactcacgtaattctggattattggcatatctatgaataattttagctccatgatcagtaaatattaatgagaacatagtattaccacctaccattatttttttcatctcattcaattcttaattgcaaagatctatataatcattatagcgttgacttatggactctggaatcttagacgatgtacagtcatctataatcatggcatatttaatacattgttttatagcatagtcgttatctacgatgttagatatttctctcaatgaatcaatcacacaatctaatgtaggtttatgacataatagcattttcagcagttcaatgtttttagattcgttgatggcaatggctatacatgtatatccgttatttgatctaatgttgacatctgaaccggattctagcagtaaagatactagagattgtttattatatctaacagccttgtgaagaagtgtttctcctcgtttgtcaatcatgttaatgtctttaagataaggtaggcaaatgtttatagtactaagaattgggcaagcataagacatgtcacaaagacccttttttgtatgtataagtgtaaaaattataacatccatagttggatttacataggtgtccaatcgggatctctccatcatcgagataattgatggcatctcccttccttttttagtagatatttcatcgtgtaagaatcaatattaatatttctaaagtatccgtgtatagcctctttatttaccacagctccatattccactagagggatatcgccgaatgtcatatactcaattagtatatgttggaggacatccgagttcattgttttcaatatcaaagagatggtttccttatcatttctccatagtggtacaatactacacattattccgtgcggctttccattttccaaaaacaatttgaccaaatctaaatctacatctttattgtatctataatcactatttagataatcagccataattcctcgagtgcaacatgttagatcgtctatatatgaataagcagtgttatctattcctttcattaacaatttaacgatgtctatatctatatgagatgacttaatataatattgaagagctgtacaatagtttttatctataaaagacggcttgattccgtgattaattagacatttaacaacttccggacgcacatatgctctcgtatccgactctgaatacagatgagagatgatatacagatgcaatacggtaccgcaatttcgtagttgataatcatcatacgcgtatcagtactcgtcctcataaagaacactgcagccattttctatgaacaaatcaataattttagaaacaggatcattgtcattacataattttctataactgaacgatggttttcacatttaacactcaagtcaaatccatgttctaccaacacctttatcaagtcaacgtctacatttttggatttcatatagctgaatatattaaagttatttatgttgctaaatccagtggcttctagtagagccatcgctatatccttattaactttaacatgtctactatttgtgtattcttctaatggggtaagctgtctccaatttttgcgtaatggattagtgccactgtctagtagtagtttgacgacctcgacattattacaatgctcattaaaaaggtatgcgtgtaaagcattattcttgaattggttcctggtatcattaggatctctgtctttcaacatctgtttaagttcatcaagagccacctcctcattttccaaatagtcaaacattttgactgaatgagctactgtgaactctatacacccacacaactaatgtcattaaatatcatgtcaaaaacttgtacaattattaataaaaataatttagtgtttaaattttaccagttccagattttacacctccgttaatacctccattaaccccactggacgatcctcctccccacattccaccgccaccagatgtataagttttagatcctttattactaccatcatgtccatggataaagacactccacatgccgccactaccccctttagaagacatattaataagacttaaggacaagtttaacaataaaattaatcacgagtaccctactaccaacctacactattatatgattatagtttctatttttacagtaccttgactaaagtttctagtcacaagagcaatactaccaacctacactattatatgattatagtttctatttttataggaacgcgtacgagaaaatcaaatgtctaatttctaacggtagtgttgataaacgattgttatccgcggatacctcctctatcatgtcgtctattttcttactttgttctattaacttattagcattatatattatttgattataaaacttatattgcttattagcccaatctgtaaatatcggattattaacatatcgtttctttgtaggtttatttaacatgtacatcactgtaagcatgtccttaccatttattttaatttgacgcatatccgcaatttctttttcgcagtcggttataaattctatatatgatggatacatgctacatgtgtacttataatcgactaatatgaagtacttgatacatattttcagtaacgatttattattaccacctatgaataagtacctgtgatcgtctaggtaatcaactgttttcttaatacattcgatggttggtaatttactcagaataatttccaatatcttaatatataattctgctatttctgggatatatttatctgccagtataacacaaatagtaatacatgtaaacccatattttgttattatattaatgtctgcgccattatctattaaccattctactaggctgacactatgcgactcaatacaatgataaagtatactacatccatgtttatctattttgtttatatcatcaatatacggcttacaaagttttagtatcgataacacatccaactcacgcatagagaaggtagggaataatggcataatatttattaggttatcatcattgtcattatctacaactaagtttccattttttaaaatatactcgacaactttaggatctctattgccaaatttttgaaaatatttatttatatgcttaaatctatataatgtagctccttcatcaatcatacatttaataacattgatgtatactgtatgataagatacatattctaacaatagatcttgtatagaatctgtatatcttttaagaattgtggatattaggatattattacataaactattacacaattctaaaatataaaacgtatcacggtcgaataatagttgatcaactatataattatcgattttgtgatttttcttcctaaactgtttacgtaaatagttagatagaatattcattagttcatgaccactatagttactatcgaataacgcgtcaaatatttcccgtttaatatcgcatttgtcaagataataatagagtgtggtatgttcacgataagtataataacgcatctctttttcgtgtgaaattaaatagtttattacgtccaaagatgtagcataaccatcttgtgacctagtaataatataataatagagaactgttttacccattctatcatcataatcagtggtgtagtcgtaatcgtaatcgtctaattcatcatcccaattataatattcaccagcacgtctaatctgttctattttgatcttgtatccatactgtatgttgctacatgtaggtattcctttatccaataatagtttaaacacatctacattgggatttgatgttgtagcgtatttttctacaatattaataccatttttgatactatttatttctatacctttcgaaattagtaatttcaataagtctatattgatgttatcagaacatagatattcgaatatatcaaaatcattgatatttttatagtcgactgacgacaataacaaaatcacaacatcgtttttgatattattatttttcttggtaacgtatgcctttaatggagtttcaccatcatactcatataatggatttgcaccactttctatcaatgattgtgcactgctggcatcgatgttaaatgttttacaactatcatagagtatcttatcgttaaccatgattggttgttgatgctatcgcattttttggtttctttcatttcagttatgtatggatttagcacgtttgggaagcatgagctcatatgatttcagtactgtagtgtcagtactattagtttcaataagatcaatctctagatctatagaatcaaaacacgataggtcagaagataatgaatatctgtaggcttcttgttgtactgtaacttctggttttgttagatggttgcatcgtgctttaacgtcaatggtacaaattttatcctcgctttgtgtatcatattcgtccctactataaaattgtatattcagattatcatgcgatgtgtatacgctaacggtatcaataaacggagcacaccatttagtcataaccgtaatccaaaaatttttaaagtatatcttaacgaaagaagttgtgtcattgtctacggtgtatggtactagatcctcataagtgtatatatctagagtaatgtttaatttattaaatggttgataatatggatcctcgtgacaatttccgaagatggaaataagacataaacacgcaataaatctaattgcggacatggttactccttaaaaaaatacgaataatcaccttggctatttagtaagtgtcatttaacactatactcatattaatccatggactcataatctctatacgggattaacggatgttctatatacggggatgagtagttctcttctttaactttatactttttactaatcatatttagactgatgtatgggtaatagtgtttgaagagctcgttctcatcatcagaataaatcaatatctctgtttttttgttatacagatgtattacagcctcatatattacgtaatagaacgtgtcatctaccttattaactttcaccgcatagttgtttgcaaatacggttaatcctttgacctcgtcgatttccgaccaatctgggcgtataatgaatctaaactttaattgcttgtaatcattcgaaataatttttagtttgcatccgtagttatcccctttatgtaactgtaaatttctcaacgcgatatctccattaataatgatgtcgaattcgtgctgtatacccatactgaatggatgaacgaataccgacggcgttaatagtaatttactttttcatctttacatattgggtactagttttactatcataagtttataaattccacaagctactatggaataagccaaccatcttagtataccacacatgtcttaaagtttattaattaattacatgttgttttatatatatcgctacgaatttaaagagaaattagtttaggaagaaaaattatctatctacatcatcacgtctctgtattctacgatagagtgctactttaagatgcgacagatccgtgtcatcaaatatatactccattaaaatgattattccggcagcgaacttgatattggatatatcacaacctttgttaatatctacgacaatagacagcagtcccatggttccataaacagtgagtttatctttctttgaagagatattttgtagagatcttataaaactgtcgaatgacatcgcatttatatctttagctaaatcgtatatgttaccatcgtaatatctaaccgcgtctatcttaaacgtttccatcgctttaaagacgtttccgatagatggtctcatttcatcagtcatactgagccaacaaatataatcgtgtataacatctttgatagaatcagactctaaagaaaacgaatcggctttattatacgcattcatgataaacttaatgaaaaatgtttttcgttgtttaagttggatgaatagtatgtcttaataattgttattatttcattaattaatatttagtaacgagtacactctataaaaacgagaatgacataactaatcataactagttatcaaagtgtctaggacgcgtaattttcatatggtatagatcctgtaagcattgtctgtattctggagctattttctctatcgcattagtgagttcagaatatgttataaatttaaatcgaataacgaacataactttagtaaagtcgtctatattaactcttttattttctagccatcgtaataccatgtttaagatagtatattctctagttactacgatctcatcgttgtctagaatatcacatactgaatctacatccaattttagaaattggtctgtgttacatatctcttctatattattgttgatgtattgtcgtagaaaactattacgtagaccattttctttataaaacgaatatatagtactccaattatctttaccgatatatttgcacacataatccattctctcaatcactacatctttaagattttcgttgttaagatatttggctaaactatataattctattagatcatcaacagaatcagtatatatttttctagatccaaagacgaactctttggcgtcctctataatattcccagaaaagatattttcgtgttttagtttatcgagatctgatctgttcatatacgccatgattgtacggtacgttatgataaccgcataaaataaaaatccattttcatttttaaccaatactattcataattgagattgatgtaatactttgttactttgaacgtaaagacagtacacggatccgtatctccaacaagcacgtagtaatcaaatttggtgttgttaaacttcgcaatattcatcaatttagatagaaacttatactcatcatctgttttaggaatccatgtattattaccactttccaacttatcattatcccaggctatgtttcgtccatcatcgttgcgcagagtgaataattcttttgtattcggtagttcaaatatatgatccatgcatagatcggcaaagctattgtagatgtgatttttcctaaatctaatataaaactcgtttactagcaaacactttcctgatttatcgaccaagacacatatggtttctaaatctatcaagtggtggggatccatagttatgacgcagtaacatatattattacattcttgactgtcgctaatatctaaatatttattgttatcgtattggattctgcatatagatggcttgtatgtcaaagatatagaacacataaccaatttatagtcgcgctttacattctcgaatctaaagttaagagatttagaaaacattatatcctcggatgatgttatcactgtttctggagtaggatatattaaagtctttacagatttcgtccgattcaaataaatcactaaataatatcccacattatcatctgttagagtagtatcattaaatctattatattttatgaaagatatatcactgctcacctctatatttcgtacatttttaaactgtttgtataatatctctctgatacaatcagatatatctattgtgtcggtagacgataccgttacatttgaattaatggtgttccattttacaacttttaacaagttgaccaattcatttctaatagtatcaaactctccatgattaaatattttaatagtatccattttatatcactacggacacaaagtagctgacataaaccattgtataatttttatgttttatgtttattagcgtacacattttggaagttccggcttccatgtatttcctggagagcaagtagatgatgaggaaccagatagtttatatccgtacttgcacttaaagtctacattgtcgttgtatgagtatgatcttttaaacccgctagacaagtatccgtttgatattgtaggatgtggacatttaacaatctgacacgtgggtggatcggaccattctcctcctgaacacaggacactagagttaccaatcaacgaatatccactattgcaactataagttacaacgctcccatcggtataaaaatcctcgtatccgttatgtcttccgttggatatagatggaggggattggcatttaacagattcacaaataggtgcctcgggattccataccatagatccagtagatcctaattcacaatacgatttagattcaccgatcaactgatatccgctattacaagagtacgttatactagagccaaagtctactccaccaatatcaagttggccattatcgatatctcgaggcgatgggcatctccgtttaatacattgattaaagagtgtccatccagtacctgtacatttagcatatataggtcccattttttgctttctgtatccaggtagacatagatattctatagtgtctcctatgttgtaattagcattagcatcagtctccacactattcttaaatttcatattaatgggtcgtgacggaatagtacagcatgatagaacgcatcctattcccaacaatgtcaggaacgtcacgctctccaccttcatatttatttatccgtaaaaatgttatcctggacatcgtacaaataataaaaagcccatatatgttcgctattgtagaaattgtttttcacagttgctcaaaaacgatggcagtgacttatgagttacgttacactttggagtctcatctttagtaaacatatcataatattcgatattacgagttgacatatcgaacaaattccaagtatttgattttggataatattcgtattttgcatctgctataattaagatataatcaccgcaagaacacacgaacatctttcctacatggttaaagtacatgtacaattctatccatttgtcttccttaactatatatttgtatagataattacgagtctcgtgagtaattccagtaattacatagatgtcgccgtcgtactctacagcataaactatactatgatgtctaggcatgggagacttttttatccaacgatttttagtgaaacattccacatcgtttaatactacatatttctcatacgtggtataaactccacccattacatatatatcatcgtttacgaataccgacgcgcctgaatatctaggagtaattaagtttggaagtcttatccatttcgaagtgccgtgtttcaaatattctgccacacccgttgaaatagaaaattctaatcctcctattacatataactttccatcgttaacacaagtactaacttctgattttaacgacgacatattagtaaccgttttccattttttcgttttaagatctacccgcgatacggaataaacatgtctattgttaatcatgccgccaataatgtatagacaattatgtaaaacatttgcattatagaattgtctatctgtattaccgactatcgtccaatattctgttctaggagagtaatgggttattgtggatatataatcagagtttttaatgactactatattatgttttataccatttcgtgtcactggctttgtagatttggatatagttaatcccaacaatgatatagcattgcgcatagtattagtcataaacttgggatgtaaaatgttgatgatatctacatcgtttggatttttatgtatccactttaataatatcatagctgtaacatcctcatgatttacgttaacgtcttcgtgggataagatagttgtcagttcatcctttgataattttccaaattctggatcggatgtcaccgcagtaatattgttgattatttctgacatcgacgcattatatagttttttaattccatatcttttagaaaagttaaacatccttatacaatttgtgaaattaatattatgaatcatagtttttacacatagatctactacaggcggaacatcaattattatggcagcaactagtatcatttctacattgtttatggtgatgtttatcttcttccagcgcatatagtctaatagcgattcaaacgcgtgatagtttataccattcaatataatcgcttcatcctttagatggtgatcctgaatgcgtttaaaaaaattatacggagacgccgtaataatttccttattcacttgtataatttccccattgatagaaaatattacgctttccattcttaaagtactataagtaattatagtataatgtaaacgtttatatattcaatatttttataaaaatcattttgacattaattcctttttaaatttccgtctatcatctatagaaacgtattctatgaatttataaaatgcttttacgtgtcctatcgtaggcgatagaaccgctaaaaagcctatcgaatttctacaaaagaatctgttatatggtatagggagagtataaaacattaaatgtccgtacttattaaagtattcagtagccaatcctaactctttcgaatacttattaatggctcttgttctgtacgaatctatttttttgaacaacggacctagtggtatatcttgttctatgtatctaaaataatgtctgactagatccgttagtttaatatccgcagtcatcttgtctagaatggcaaatctaactgcgggtttaggctttagtttagtttctatatctacatctatgtctttatctaacaccaaaaatataatagctaatattttattacaatcatccggatattcttctacgatctcactaactaatgtttctttggttatactagtatagtcactatcggacaaataaagaaaatcagatgatcgatgaataatacatttaaattcatcatctgtaagatttttgagatgtctcattagaatattattagggttagtactcattatcattcggcagctattacttattttattatttttcaccatatagatcaatcattagatcatcaaaatatgtttcaatcatcctaaagagtatggtgaatgactcttcccatctaatttctgaacgttcaccaatgtctctagccactttggcactaatagcgatcattcgcttagcgtcttctatattattaactggttgatttaatctatctagcaatggaccgtcggacagcgtcattctcatgttcttaatcaatgtacatacatcgccgtcatctaccaattcatccaacaacataagctttttaaaatcatcattataataggtttgatcgttgtcatttctccaaagaatatatctaataagtagagtcctcatgcttagttaacaactattttttatgttaaatcaattagtacaccgctatgtttaatacttattcatattttagtttttaggattgagaatcaatacaaaaattaatgcatcattaattttagaaatacttagtttccacgtagtcaatgaaacatttgaactcatcgtacaggacgttctcgtacaggacgtaactataaaccggtttatatttgttcaagatagatacaaatccgataactttttttacgaattctacgggatccactttaaaagtgtcataccgggttctttttatttttttaaacagatcaatggtgtgatgttgattaggtcttttacgaatttgatatagaatagcgtttacatattctccataatggtcaatcgccatttgttcgtatgtcataaattctttaattatatgacactgtgtattatttagttcatccttgttcattgttaggaatctatccaaaatggcaattatactagaactataggtgcgttgtatacacatattgatgtgtctgtttatacaatccatgatatttggatccatgctactaccttcgggtaaaattgtagcatcatataccatttctagtactttaggttcattattatccattgcagaggacgtcatgatcgaatcataaaaaaatatattatttttatgttattttgttaaaaataatcatcgaatacttcgtaagatactccttcatgaacataatcagttacaaaacgtttatatgaagtaaagtatctacgatttttacaaaagtccggatgcataagtacaaagtacgcgataaacggaataataatagatttatctagtctatctttttctatagctttcatagttagatacatggtctcagaagtaggattatgtaacatcagcttcgataaaatgactgggttatttagtcttacacattcgctcatacatgtatgaccgttaactacagagtctacactaaaatgattgaacaatagatagtctaccattgtttcgtattcagatagtacagcgtagtacatggcatcttcacaaattatatcattgtctaatagatatttgacgcatcttatggatcccacttcaacagccatcttaaaatcatattgctttcctttatcattaataatttctagaacatcatctctatcataaaagatacaaatattaactgtttgatccgtaataacattgctagtcaatagcaatttgttaataagatgcgctgggctcaatgtcttaataagaagtgtaagaggactatctccgaatttgttttgtttattaacatccgttgatggaagtaaaagatctataatgtctacattcttgactgttttagagcatacaatatggagaggtgtatttccatcatgatctggttttgagggactaattcctagtttcatcatccatgagattgtagaagcttttggattgtctgacataagatgtctatgaatatgatttttgccaaatttatccactatcctggcttcgaatccgatggacattatttttttaaacactctttctgaaggatctgtacacgccaacaacggaccacatccttcttcatcaaccgagttgttaatcttggctccatactgtaccaataaatttattctctctatgacttcatcatctgttcccgagagataatatagaggtgttttatgctgtttatcacacgcgtttggatctgcgccgtgcgtcagcagcatcgcgactattctattattattaattttagaagctatatgcaatggataatttccatcatcatccgtctcatttggagagtatcctctatgaagaagttcttcgacaaatcgttcatctagtcctttaattccacaatacgcatgtagaatgtgataattatttccagaaggttcgatagcttgtagcatattcctaaatacatctaaatttttactattatatttggcataaagagatagataatactcggccgacataatgttgtccattgtagtataaaaattaatatttctatttctatttctgtatatttgcaacaatttactctctataacaaatatcataacttagtttttttatgtcaagaaggcactggtttagttcatctataaatgtcacgccataactaccacgcatgccatactcagaattatgataaagatatttatccttggggtgtaggtaatggggattaatctttgttggatcagtctctaagttaacacatgtcacacatgatccatttatagttatatcacacgatgatgatttatgaattgattccggaagatcgctatcgtattttgtggttccacaattcatttccatacatgttattgtcacactaatattatgatgaactttatctagccgctgagtggtaaacaacagaacagatagtttattatctttaccaacaccctcagccgctgccacaaatctctgatccgtatccatgatggtcatgtttatttctagtccgtatccagtcaacactatgttagcatttctgtcgatatagctttcactcatatgacactcaccaataatagtagaattaatgtcgtaatttacaccaatagtgagttcggcggcaaagtaccaataccggtaatcttgtcgaggaggacatatagtattcttgtattctaccgaatacccgagagatgcgatacaaaagagcaagactaatttgtaaaccatcttactcaaaatatgtaacaatagtacgatgcaatgagtaagacaataggaaatctatcttatatacacataattattctatcaattttaccaattagttagtgtaatgttaacaaaaatgtgggagaatctaattagtttttctttacacaattgacgtacatgagtctgagttccttgtttttgctaattatttcatccaatttattattcttgacgatatcgagatcttttgtataggagtcaaacttgtattcaacatgcttttctataatcattttagctatttcggcatcatccaatagtacattttccagattagcagaatagatattaatgtcgtatttgaacagagcctgtaacatctcaatgtctttattatctatagccaatttaatgtccggaatgaagagaagggaattattggtgtttgtcgacgtcatatagtcgagcaagagaatcatcatatccacgtgtccattttttatagtgatgtgaatacaactaaggagaatagccagatcaaaagtagatggtatctctgaaagaaagtaggaaacaatacttacatcattaagcatgacggcatgataaaatgaagttttccatccagttttcccatagaacatcagtctccaatttttcttaacaaacagttttaccgtttgcatgttaccactatcaaccgcataatacaatgcggtgtttcccttgtcatcaaattgtgaatcatccagtccactgaatagcaaaatctttactattttggtatcttccaatgtggctgcctgatgtaatggaaattcattctctagaagatttttcaatgctccagcgttcaacaacgtacatactagacgcacgttattatcagctattgcataatacaaggcactatgtccatggacatccgccttaaatgtatctttactagagagaaagcttttcagctgcttagacttccaagtattaattcgtgacagatccatgtctgaaacgagacgctaattagtgtatattttttcattttttataattttgtcatattgcaccagaattaataatatctttaatagatctgattagtagatacatggctatcgcaaaacaacatatacacatttaataaaaataatatttattaagaaaattcagatttcacgtacccatcaatataaataaaataatgattccttacaccgtacccatattaaggagattccaccttacccataaacaatataaatccagtaatatcatgtctgatgatgaacacaaatggtgtattaaattccagtttttcaggagatgatctcgccgtagctaccataatagtagatgcctctgctacagttccttgttcgtcgacatctatctttgcattctgaaacattttataaatatataatgggtccctagtcatatgtttaaacgacgcattatctggattaaacatactaggagccatcatttcggctatcgacttaatatccctcttattttcgatagaaaatttagggagtttaagattgtacactttattccctaattgagacgaccaatagtctaattttgcagccgtgatagaatctgtgaaatgggtcatattatcacctattgccaggtacatactaatattagcatccttatacggaaggcgtaccatgtcatattctttgtcatcgattgtgattgtatttccttgcaatttagtaactacgttcatcatgggaaccgttttcgtaccgtacttattagtaaaactagcattgcgtgttttagtgatatcaaacggatattgccatatacctttaaaatatatagtattaatgattgcccatagagtattattgtcgagcatattagaatctactacattagacataccggatctacgttctactatagaattaattttattaaccgcatctcgtctaaagtttaatctatataggccgaatctatgatattgttgataatacgacggtttaatgcacacagtattatctacgaaactttgataagttagatcagtgtacgtatatttagatgttttcagcttagctaatcctgatattaattctgtaaatgctggacccagatctctttttctcaaatccatagtcttcaataattctattctagtattacctgatgcaggcaatagcgacataaacatagaaaacgaataaccaaacggtgagaagacaatattatcatcttgaatatttttatacgctactataccggcattggtaaatccttgtagacgataggcggacgctgaacacgctaacgatagtatcaataacgcaatcatgattttatggtattaataattaaccttatttttatgttcggtataaaaaaattattgatgtctacacatccttttgtaattgacatctatatatccttttgtataatcaactctaatcactttaacttttacagttttccctaccagtttatccctatattcaacatatctatccatatgcatcttaacactctctgccaagatagcttcagagtgaggatagtcaaaaagataaatatatagagcataatcattctcgtatactctgccctttattacatcacccgcattgggcaacgaataacaaaatgcaagcatcttgttaacgggctcgtaaattgggataaaaattatgtttttattgtcttatatctattttattcaagagaatattcaggaatttctttttccggttgtatctcgtcgcagtatatatcatttgtacattgtttcatattttttaatagtttacaccttttagtaggactagtatcgtacaattcatagctgtattttgaattccaatcacgcataaaaatatcttccaattgttgacgaagacctaatccatcatccggtgtaatattaatagatgctccacatgtatccgtaaagtaatttcctgtccaatttgaggtacctatataggccgttttatcggttaccatatatttggcatggtttaccctagaatacggaatgggaggatcagcatctggtacaataaatagctttacttctatatttatgtttttagattttagcatagcgatagatcttaaaaagtttctcatgataaacgaagatcgttgccagcaactaatcaatagcttaacggatacttgtctgtctatagcggatcttcttaattcatcttctatataaggccaaaacaaaattttacccgccttcgaataaataatagggataaagttcataacagatacataaacgaatttactcgcatttctaatacatgacaataaagcggttaaatcattggttctttccatagtacatagttgttgcggtgcagaagcaataaatacagagtgtggaacgccgcttacgttaatactaagaggatgatctgtattataatacgacggataaaagtttttccaattatatggtagattgttaactccaagataccagtatacctcaaaaatttgagtgagatccgctgccaagttcctattattgaagatcgcaatacccaattccttgacctgagttagtgatctccaatccatgttagcgcttcctaaataaatatgtgtattatcagatatccaaaattttgtatgaagaactcctcctaggatatttgtaatatctatgtatcgtacttcaactccggccatttgtagtctttcaacatcctttaatggtttgttagatttattaacggctactctaactcgtactcctcttttgggtaattgtacaatctcgtttaatattatcgtgccgaaattcgtacccacttcatccgataaactccaataaaaagatgatatatctagtgtttttgtggtattggatagaatttccctccacatgttaaatgtagacaaatatactttatcaaattgcatacctataggaatagtttctgtaatcactgcgattgtattatccggattcattttatttgttaaaagaataatcctatatcacttcactctattaaaaatccaagtttctatttctttcatgactgattttttaacttcatccgtttccttatgaagatgatgtttggcaccttcataaatttttatttctctattacaatttgcatgttgcatgaaataatatgcacctaaaacatcgctaatcttattgtttgttccctggagtatgagagtcggggggtgttaatcttggaaattatttttctaaccttgttggtagccttcaagacctgactagcaaatccagccttaattttttcatgattgactaatgggtcgtattggtatttataaactttatccatatctctagatactgattctggacatagctttccgactggcgcatttggtgtgatggttcccataagtttggcagctagcagattcagtcttgaaacagcatctgcattaactagaggagacattagaatcattgctgtaaacaagtttggattatcgtaagaggctagctcccatggaatgacccaataagtagatttaatagttaccacgtgctgtaccaaagtcatcaatcatcattttttcaccattacttcttccatgtccaatatgatcatgtgagaatactaaaattcctaacgatgatatgttttcagctagttcgtcataacgtccagaatgtttaccagctccatgacttatgaatactaatgccttaggatatgtaataggtttccaatatttacaatatatgtaatcattgtccagattgaacatacagtttgcactcatgattcacgttatataactatcaatattaacagttcgtttgatgatcatattatttttatgttttattgataattgtaaaaacatacaattaaatcaatatagaggaaggagacggctactgtcttttgtaagatagtcatggcgactaaattagattatgaggatgctgttttttactttgtggatgatgataaaatatgtagtcgcgactccatcatcgatctaatagatgaatatattacgtggagaaatcatgttatagtgtttaacaaagatattaccagttgtggaagactgtacaaggaattgatgaagttcgatgatgtcgctatacggtactatggtattgataaaattaatgagattgtcgaagctatgagcgaaggagaccactacatcaattttacaaaagtccatgatcaggaaagtttattcgctaccataggaatatgtgctaaaatcactgaacattggggatacaaaaagatttcagaatctagattccaatcattgggaaacattacagatttgatgaccgacgataatataaacatcttgatactttttctagaaaaaaaattgaattgatgatataggggtcttcataacgcataattattacgttagcattctatatccgtgttaaaaaaaattatcctatcatgtatttgagagttttatatgtagcaaacatgatagctgtgatgccaataagctttagatattcacgcgtgctagtgttagggatggtattatctggtggtgaaatgtccgttatataatctacaaaacaatcatcgcatatagtatgcgatagtagagtaaacatttttatagtttttactggattcatacatcgtctacccaattcggttataaatgaaattgtcgccaatcttacacccaaccccttgttatccattagcatagtattaacttcgttatttatgtcataaactgtaaatgattttgtagatgccatatcatacatgatattcatgtccctattataatcattactaactttatcacaatatatgttgataatatctatatatgatctagtctttgtgggcaactgtctatacaagtcgtctaaacgttgtttactcatatagtatcgaacagccatcattacatggtcccgttccgttgatagataatcgagtatgttagtggacttgtcaaatctatataccatattttctggaagtggatatacatagtcgtgatcaacattattgctagcctcatcttctatatcctgtactataccattatctatatcatctacataatctatgatattattacacataaacatcgacaacatactattgtttattatctaagtcctgttgatccaaacccttgatctcctctatttgtactatctagagattgtacttcttccagttctggataatatatacgttgatagattagctgagctattctatctccagtatttacattaaacgtacattttccattattaataagaatgactcctatgtttcccctataatcttcgtctattacaccacctcctatatcaatgccttttagtgacagaccagacctaggagctattctaccatagcagaacttaggcatggacatactaatatctgtcttaattaactgtctttctcctggagggatagtataatcgtaagcgctatacaaatcatatccggcagcacccggcgattgcctagtaggagatttagctctgttagtttccttaacaaatctaactggtgagttaatattcatgttgaacataaaactaatattttatttcaaaattatttaccatcccatatattccatgaataagtgtgatgattgtacacttctatagtatctatatacgatccacgataaaatcctcctatcaatagcagtttattatccactatgatcaattctggattatccctcggataaataggatcatctatcagagtccatgtattgctggattcacaataaaattccgcatttctaccaaccaagaataaccttctaccgaacactaacgcgcatgatttataatgaggataataagtggatggtccaaactgccactgatcatgattgggtagcaaatattctgtagttgtatcagtttcagaatgtcctcccattacgtatataacattgtttatggatgccactgctggattacatctaggtttcagaagactcggcatattaacccaagcagcatccccgtggaaccaacgctcaacagatgtgggatttggtagacctcctactacgtataatttattgttagcgggtatcccgctagcatacagtctggggctattcatcggaggaattggaatccaattgtttgatatataatttacagctatagcattgttatgtatttcattgttcatccatccaccgatgagatatactacttctccaacatgagtacttgtacacatatggaatatatctataatttgatccatgttcataggatactctatgaatggatacttgtatgatttgcgtggttgtttatcacaatgaaatattttggtacagtctagtatccattttacattatttatacctctgggagaaagataatttgacctgattacatttttgataaggagtagcagatttcctaatttatttcttcgcctcatataccacttaatgacaaaatcaactacataatcctcatctggaacatttagttcatcgctttctagaataagtttcatagatagataatcaaaattgtctatgatgtcatcttccagttccaaaaagtgtttggcaataaagtttttagtatgacataagagattggatagtccgtattctatacccatcatgtaacactcgacacaatattcctttctaaaatctcgtaagataaagtttatacaagtgtagatgataaattctacagaggttaatatagaagcacgtaataaattgacgacgttatgactatctatatatacctttccagtatatgagtaaataactatagaagttaaactgtgaatgtcaaggtctagacaaacccttgtaactggatctttatttttcgtgtatttttgacgtaaatgtgtgcgaaagtaaggagataactttttcaatatcgtagaattgactattatattgcctcctatggcatcaataattgttttgaatttcttagtcatagacaatgctaatatattcttacagtacacagtattgacaaatatcggcatttatgtttctttaaaagtcaacatctagagaaaaatgattatctttttgagacataactcccattttttggtattcacccacacgtttttcgaaaaaattagtttttccttccaatgatatattttccatgaaatcaaacggattggtaacattataaatttttttaaatcccaattcagaaatcaatctatccgcgacgaattctatatatgttttcatcatttcacaattcattcctataagtttaactggaagagccgcagtaagaaattcttgttcaatggatactgcatctgttataatagatctaacggtttcttcactcggtggatgcaataaatgtttaaacatcaaacatgcgaaatcgcagtgcagaccctcgtctctactaattagttcgttggaaaacgtgagtccgggcattaggccacgctttttaagccaaaatatggaagcgaatgatccagaaaagaaaattccttctactgcagcaaaggcaataagtctctctccataaccggcgctgtcatgtatccacttttgagcccaatcggccttcttttttacacaaggcatcgtttctatggcattaaagagatagtttttttcattactatctttaacataagtatcgatcaaaagactatacatttccgaatgaatgttttcaatggccatctgaaatccgtagaaacatctagcctcggtaatctgtacttctgtacaaaatcgttccgccaaattttcattcactattccgtcactggctgcaaaaaacgccaatacatgttttataaaatatttttcgtctggtgttagtttattccaatcattgatatctttagatatatctacttcttccactgtccaaaatgatgcctctgcctttttatacatgttccagatgtcatgatattggattgggaaaataacaaatctatttggatttggtgcaaggatgggttccataactaaattaacaataacaataaattttttttcagttatctatatgcctgtacttggattttttgtacatcgatatcgccgcaatcactacaataattacaagtattattgatagcattgttattagtactatcataattaaattatctacattcatgggtgctgaataatcgttattatcatcattatcattttgtaattgtgacatcatactagataaatcgtttgcgagattgttgtgggaagcgggcatggaggatgcattatcattattatttaacgccttccatttggattcacaaatgttacgcacattcaacattttatggaaactataattttgtgaaaacaaataacaagaaaactcgtcatcgttcaaatttttaacgatagtaaaccgattaaacgtcgagctaatttctaacgctagcgactctgttggatatgggtttccagatatatatcttttcagttcccctacgtatctataatcatctgtaggaaatggaagatatttccatttatctactgttcctaatatcatatgtggtggtgtagtagaaccattaagcgcgaaagatgttatttcgcatcgtattttaacttcgcaataatttctggttagataacgcactctaccagtcaagtcaatgatattagcctttacagatatattcatagtagtcgtaacgatgactccatcttttagatgcgatactcctttgtatgtaccagaatcttcgtacctcaaactcgatatatttaaacaagttaatgagatattaacgcgttttatgaatgatgatatataaccagaagttttatcctcggtggctagcgctataaccttatcattataataccaactagtgtgattaatatgtgacacgtcagtgtgggtacaaatatgtacattatcgtctacgtcgtattcgatacatccgcatacagccaacaaatataaaatgacaaatactctaacgccgttcgtacccatcttgatgcggtttaataaatgttttgatttcaatttattgtaaaaaaagattcggttttatactgttcgatattctcattgcttatattttcatctatcatctccacacagtcaaatccgtggttagcatgcacctcatcaaccggtaaaagactatcggactcttctatcattataactctagaatatttaatttggtcattattaatcaagtcaattatcttatttttaacaaacgtgagtattttactcattttttataaaaacttttagaaatatacagactctatcgtgtgtctatatcttctttttatatccaatgtatttatgtctgatttttcttcatttatcatatataatggtccaaattctacacgtgcttcggattcatccagatcattaaggttcttataattgtaacatccttctcttccctcttctacatcttccttcttattcttattcttagcgtcacagaatctaccacagcaggatcccatgacgagcgtcatattaaactaatccattttcaattataatatatgattagtaatgaccattaaaataaaaaatattcttcataaccggcaagaaagtgaaaagttcacattgaaactatgtcagtagtatacatcatgaaatgatgatatatatatactctattttggtggaggattatatgatataattcgtggataatcatttttaagacacatttctttattcgtaaatcttttcacgttaaatgagtgtccatattttgcaatttcttcatatgatggcggtgtacgtggacgaggctgctcctgttcttgttgtggtcgccgactgtcgtgtctgcgtttagatccctccattatcgcgattgcgtagatggagtactattttataccttgtaattaaatttttttattaattaaacgtataaaaacgttccgtatctgtatttaagagccagatttcgtctaatagaacaaatagctacagtaaaaataactagaataattgctacacccactagaaaccacggatcgtaatacggcaatcggttttcgataataggtggaacgtatattttatttaaggacttaacaattgtctgtaaaccacaatttgcttccgcggatcctgtattaactatctgtaaaagcatatgttgaccgggcggagccgaacattctccgatatctaatttctgtatatctataatattattaacctccgcatacgcattacagttcttttctagcttggataccgcactaggtacatcgtctagatctattcctatttcctcagcgatagctcttctatccttttccggaagcaatgaaatcacttcaataaatgattcaaccatgagtgtgaaactaagtcgagaattactcatgcatttgttagttattcggagcgcgcaatttttaaactgtcctataacctctcctatatgaatagcacaagtgacattagtagggatagaatgttgagctaatttttgtaaataactatctataaaaagattatacaaagttttaaactctttagtttccgccatttatccagtctgagaaaatgtctctcataataaatttttccaagaaactaattgggtgaagaatggaaacctttaatctatatttatcacagtctgttttggtacacatgatgaattcttccaatgccgtactaaattcgatatctttttcgatttctggatatgtttttaataaagtatgaacaaagaaatggaaatcgtaataccagttatgtttaactttgaaattgttttttattttcttgttaatgattccagccacttgggaaaagtcaaagtcgtttaatgccgatttaatacgttcattaaaaacaaactttttatcctttagatgaattattattggttcattggaatcaaaaagtaagatattatcgggtttaagatctgcgtgtaaaaagttgtcgcaacagggtagttcgtagattttaatgtataacagagccatctgtaaaaagataaactttatgtattgtaccaaagatttaaatcctaatttgatagctaactcggtatctactttatctgccgaatacagtgctaggggaaaaattataatgtttcctctttcatattcgtagttagttctcttttcatgttcgaaaaagtgaaacatgcggttaaaatagtttataacattaatattactgttaataactgccggataaaagtgggatagtaatttcacgaatttgatactgtcctttctctcgttaaacgcctttaaaaaaactttagaagaatatctcaatgagagttcctgaccatccatagtttgtatcaataatagcaacatatgaagaacacgtttatacagagtatgtaaaaatgttaatttatagtttaatcccatggcccacgcacacacgattaattttttttcatctccctttagattgttgtatagaaatttgggtactgtgaactccgccgtagtttccatgggactatataattttgtggcctcgaatacaaattttactacatagttatctatcttaaagactataccatatcctcctgtagatatgtgataaaaatcgtcgtttataggataaaatcgtttatccttttgttggaaaaaggatgaattaatgtaatcattctcttctatctttagtagtgtttccttattaaaattcttaaaataatttaacaatctaactgacggagcccaattttggtgtaaatctaattgggacattatattgttaaaatacaaacagtctcctaatataacagtatctgataatctatggggagacatccattgatattcaggggatgaatcattggcaacacccatttattgtacaaaaagccccaatttacaaacgaaagtccaggtttgatagagacaaacaattaactattttgtctctgtttttaacacctccacagtttttaatttctttagtaatgaaattattcacaatatcagtatcttctttatctaccagagattttactaacttgataaccttggctgtctcattcaatagggtagtaatatttgtatgtgtgatattgatatctttttgaattgtttcttttagaagtgattctttgatggtgccagcatacgaattacaataatgcagaaactcggttaacatgcaggaattatagtaagccaattccaattgttgcctgtgttgtattagagtgtcaatatgagcaatggtgtccttgcgtttctctgatagaatgcgagcagcgattttggcgttatcatttgacgatatttctggaatgacgaatcctgtttctactaactttttggtaggacaaagtgaaacaatcaagaagatagcttctcctcctatttgtggaagaaattgaactcctctagatgatctactgacgatagtatctccttgacagatattggaccgaattacagaagtacctggaatgtaaagccctgaaaccccctcattttttaagcagattgttgccgtaaatcctgcactatgcccaagatagagagctcctttggtgaatccatctctatgtttcagtttaaccaagaaacagtcagctggtctaaaatttccatctctatctaatacagcatctaacttgatgtcaggaactatgaccggtttaatgttatatgtaacattgagtaaatccttaagttcataatcatcactgtcatcagttatgtacgatccaaacaatgtttctaccggcatagtggatacgaagatgctatccatcagaatgtttccctgattagtattttctatatagctattcttctttaaacgattttccaaatcagtaactatgttcatttttttaggagtaggacgcctagccagtatggaagaggattttctagatcctctcttcaacatctttgatctcgatggaatgcaaaaccccatagtgaaacaaccaacgataaaaataatattgtttttcactttttataattttaccatctgactcatggattcattaatatctttataagagctactaacgtataattctttataactgaactgagatatatacaccggatctatggtttccataattgagtaaatgaatgctcggcaataactaatggcaaatgtatagaacaacgaaattatactagagttgttaaagttaatattttctatgagctgttccaataaattatttgttgtgactgcgttcaagtcataaatcatcttgatactatccagtaaaccgtttttaagttctggaatattatcatcccattgtaaagcccctaattcgactatcgaatatcctgctctgatagcagtttcaatatcgacggacgtcaatactgtaataaaggtggtagtattgtcatcatcgtgataaactacgggaatatggtcgttagtaggtacggtaactttacacaacgcgatatataactttccttttgtaccatttttaacgtagttgggacgtcctgcagggtattgttttgaagaaatgatatcgagaacagatttgatacgatatttgttggattcctgattattcactataatataatctagacagatagatgattcgataaatagagaaggtatatcgttggtaggataatacatccccattccagtattctcggatactctattgatgacactagttaagaacatgtcttctattctagaaaacgaaaacatcctacatggactcattaaaacttctaacgctcctgattgtgtctcgaatgcctcgtacaaggatttcaaggatgccatagattctttgaccaacgatttagaattgcgtttagcatctgatttttttattaaatcgaatggtcggctctctggtttgctaccccaatgataacaatagtcttgtaaagataaaccgcaagaaaatttatacgcatccatccaaataaccctagcaccatcggatgatattaatgtattattatagattttccatccacaattattgggccagtatactgttagcaacggtatatcgaatagattactcatgtaacctactagaatgatagttcgtgtactagtcataatatctttaatccaatctaaaaaatttaaaattagattttttacactgttaaagttaacaaaagtattacccgggtacgtggatatcatatatggcattggtccattatcagtaatagctccataaactgatacggcgatggtttttatatgtgtttgatctaacgaggaagaaattcgcgcccacaattcatctctagatatgtatttaatatcaaacggtaacacatcaatttcgggacgcgtatatgtttctaaatttttaatccaaatataatgatgacctatatgccctattatcatactgtcaactatagtacacctagggaacttacgatacatctgtttcctataatcgttaaattttacaaatctataacatgctaaaccttttgacgacagccattcattaatttctgatatggaatctgtattctcgataccgtatcgttctaaagccagtgctatatctccctgttcgtgggaacgctttcgtataatatcgatcaacggataatctgaagtttttggagaataatatgactcatgatctatttcgtccataaacaatctagacataggaattggaggcgatgatcttaattttgtgcaatgagtcgtcaatcctataacttctaatcttgtaatattcatcatcgacataatactatctatgttatcatcgtatattagtataccatgaccttcttcatttcgtgccaaaatgatatacagtcttaaatagttacgcaatatctcaatagtttcataattgttagctgttttcatcaaggtttgtatcctgtttaacatgatggcgttctataacgtctctattttctatttttaattttttaaatttttaacgatttactgtggctagatacccaatctctctcaaatatttttttagcctcgcttacaagctgtttatctatactattaaaactgacgaatccgtgattttggtaatgggttccgtcgaaatttgccgaagtgatatgaacatattcgtcgtcgactatcaacaattttgtattattctgaatagtgaaaaccttcacagatagatcattttgaacacacaacgcatctagacttttggcggttgccatagaatatacgtcgttcttatcccaattaccaactagaagtctgatcttaactcctctattaatggctgcttctataatggagttgtaaatgtcgggccaatagtagctattaccgtcgacacgtgtagtgggaactatggccaaatgttcaatatctatactagtcttagctgacctgagtttatcaataactacatcggtatctagatctctagaatatcccaataggtgttccggagaatcagtaaagaacactccacctataggattcttaatatgatacgcagtgctaactggcaaacaacaagccgcagagcataaattcaaccatgaattttttgcgctattaaaggctttaaaagtatcaaatcttctacgaagatctgtggccagcgggggataatcagaatatacacctaacgttttaatcgtatgtatagatcctccagtaaatgacgcgtttcctacataacatctttcatcatctgacacccaaaaacaaccgagtagtagtcccacattattttttttatctatattaacggttataaaatttatatccgggcagtgactttgtagctctcccagatttcttttccctcgttcatctagcaaaactattattttaatccctttttcagatgcctcttttagtttatcaaaaataagcgctcccctagtcgtactcagaggattacaacaaaaagatgctatgtatatatatttcttagctagagtgataatttcgttaaaacattcaaatgttgttaaatgatcggatctaaaatccatattttctggtagtgtttctaccagcctacattttgctcccgcaggtaccgatgcaaatggccacatttagttaacataaaaacttatacatcctgttctatcaacgattctagaatatcatcggctatatcgctaaaattttcatcaaagtcgacatcacaacctaactcagtcaatatattaagaagttccatgatgtcatcttcgtctatttctatatccgtatccattgtagattgttgaccgattatcgagtttaaatcattactaatactcaatccttcagaatacaatctgtgtttcattgtaaatttataggcggtgtatttaagttggtagattttcaattatgtattaatatagcaacagtagttcttgctcctccttgattctagcatcctcttcattattttcttctacgtacataaacatgtccaatacgttagacaacacaccgacgatggcggccgcaggatcctcaagagccagactcacatttcagctgcttttccaggccacagatgatcagttccaggccaaaaaggaatgcaggctcagccccttggtggtcaaacaactcaatagcttgccgcagcagtggtggcatggagtcagtggtgggggtctccctctcctccttggcaacttggtgctcctggtcctccagcacacagcccaaggtgaagtggcccacagcagagagggcatacaaggcattttccagggagaagccttgttggcacaggaatgccagctggttctccagggtctcatactgcttctctgtaggcctggtgcccaagtgaactttggcaccatcccggtgggagagcaaggcacatctgaagctcttggcattgttcctcaggaagtcctgccaggactccccttccagagggcagaagtgggtgtggtgcctgtccaacatctcaatggccagggcatcaagcagagccctcttgttcttcacatgccagtacagggtaggctgctccacacccagcttctgggccagcttcctggtggtcaagccctcaatgccaacttcattcaggagctccaaggcagagttgatgactttgctcttgtccagtctggacatctcgagttatgatctacttccttaccgtgcaataaattagaatatattttctacttttacgagaaattaattattgtatttattatttatgggtgaaaaacttactataaaaagcgggtgggtttggaattagtgaaagcttacagacacgaatatgactaaaccgatgaccatttaaaaacccctctctagctttcacttaaactgtatcgatcattcttttagcacatgtataatataaaaacattattctatttcgaatttaggcttccaaaaatttttcatccgtaaaccgataataatatatatagacttgttaatagtcggaataaatagattaatgcttaaactatcatcatctccacgattagagatacaatatttacattctttttgctgtttcgaaactttatcaatacacgttaatacaaacccaggaaggagatattgaaactgaggctgttgaaaatgaaacggtgaatacaataattcagataatgtaaaatcatgattccgtattctgatgatattagaactgctaatggatgtcgatggtatgtatctaggagtatctattttaacaaagcatcgatttgctaatatacaattatccttttgattaattgttattttattcatattcttaaaaggtttcatatttatcaattcttctacattaaaaatttccatttttaatttatgtagccccgcaatactcctcattacgtttcattttttgtctataatatccattttgttcatctcggtacatagattatccaattgagaagcgcatttagtagttttgtacattttaagtttattgacgaatcgtcgaaaactagttatagttaacattttattatttgataccctgatattaatacccctgccgttactattatttataactgatgtaatccacgtaacattggaattaactatcgatagtaatgcatcgacgcttccaaaattgtctattataaactcaccgataatttttttattgcatgttttcatattcattaggattatcaaatctttaatcttattacgattgtatgcgttgatattacaagacgtcattctaaaagacggaggatctccatcaaatgccagacaatcacgtacaaagtacatggaaataggttttgttctattgcgcatcatagatttatatagaacacccgtagaaatactaatttgttttactctataaaatactaatgcatctatttcatcgttttgtataacgtctttccaagtgtcaaattccaaatttttttcattgatagtaccaaattcttctatctctttaactacttgcatagataggtaattacagtgatgcctacatgccgttttttgaaactgaatagatgcgtctagaagcgatgctacgctagtcacaatcaccactttcatatttagaatatatatatgtaaaaatatagtagaatttcattttgtttttttctatgctataaatgaattctcattttgcatctgctcatactccgttttatattaataccaaagaaggaagatatctggttctaaaagccgttaaagtatgcgatgttagaactgtagaatgcgaaggaagtaaagcttcctgcgtactcaaagtagataaaccctcatcgcccgcgtgtgagagaagaccttcgtccccgtccagatgcgagagaatgaataaccctggaaaacaagttccgtttatgaggacggacatgctacaaaatatgttcgcggctaatcgcgataatgtagcttctagacttttgtcctaaaatactattatatccttttcgatattaataaatccgtgtcgtccaggttttttatctctttcagtatgtgaatagataggtattttatctctattcatcatcgaatttaagagatccgataaacattgtttgtattctccagatgtcagcatctgatacaacaatatatgtgcacataaacctctggcacttatttcatgtaccttccccttatcactaaggagaatagtatttgagaaatatgtatacatgatattatcatgaattagatatacagaatttgtaacactctcgaaatcacacgatgtgtcggcgttaagatctaatatatcactcgataacacattttcatctagatacactagacattttttaaagctaaaatagtctttagtagtaacagtaactatgcgattattttcatcgatgatacatttcatcggcatattattacgcttaccatcaaagactataccatgtgtatatctaacgtattctagcatggttgccatacgcgcattaaacttttcaggatctttggatagatcttccaatctatctatttgagaaaacatttttatcatgttcaatagttgaaacgtcggatccactatatagatattatctataaagattttaggaactacgttcatggtatcctggcgaatattaaaactatcaatgatatgattatcgttttcatcttttatcaccatatagtttctaagatatgggattttacttaatataatattatttcccgtgataaattttattagaaaggccaaatctataagaaaagtcctagaattagtctgaagaatatctatatcgccgtatagtatatttggattaattagatatagagaatatgatccgtaacatatacaacttttattatggcgtctaagatattcttccatcaacttattaacatttttgactagggaagatacattatgacgtcccattacttttgccttgtctattactgcgacgttcatagaatttagcatatctcttgccaattcttccattgatgttacattataagaaattttagatgaaattacatttggagctttaatagtaagaactcctaatatgtccgtgtatgtggtcactaatacagattgtagttctataatcgtaaataatttacctatattatatgtttgagtctgtttagaaaagtagctaagtatacgatcttttatttctgatgcagatgtattaacatcggaaaaaaatctttttttattcttttttactaaagatacaaatatgtctttgttaaaaacagttattttctgaatatttctagcttgtaattttaacatatgatattcgttcacactaggtactctgcctaaataggtttctataatctttaatgtaatattaggaaaagtattctgatcaggattcctattcattttgaggatttaaaactctgattattgtctaatatggtctctacgcaaactttttcacagagcgatagagtttttgataactcgtttttcttaagaaatataaaactactgtctccagagctcgctctatcttttattttatctaattcgatacaaactcctgatactggttcagaaagtaattcattaattttcagtcctttatagaagatatttaatatagataatacaaaatcttcagtttttgatatcgatctgattgatcctagaactagatatattaataacgtgctcattaggcagtttatggcagcttgataattagatatagtatattccagttcatatttattagataccgcattgcccagattttgatattctatgaattcctctgaaaataaatccaaaataactagacattctattttttgtggattagtgtactctcttccctctatcatgttcactactggtgtccacgatgataaatatctagagggaatataatatagtccataggatgccaatctagcaatgtcgaataactgtaattttattcttcgctcttcattatgaattgattcttgaggtataaacctaacacaaattatattattagacttttcgtatgtaatgtctttcatgttataagtttttaatcctggaatagaatctattttaatgaggcttttaaacgcagagttctccaacgagtcaaagcataatactctgttgtttttcttatatacgatgttacgattttcttctttgaatggaataggtttttgaattagtttataattacaacataatagataaggaagtgtgcaaatagtacgcggaaaaaacataatagctcccctgttttcatccatggttttaagtaaatgatcactggcttctttagtcaatggatattcgaacattaaccgtttcatcatcattggacagaatccatatttcttaatgtaaagagtgatcaaatcattgtgtttattgtaccatcttgttgtaaatgtgtattcggttatcggatctgctcctttttctattaaagtatcgatgtcaatctcgtctaagaattcaactatatcgacatatttcatttgtatacacataaccattactaacgtagaatgtataggaagagatgtaacgggaacagggtttgttgattcgcaaactattctaatacataattcttctgttaatacgtcttgcacgtaatctattatagatgccaagatatctatataattattttgtaagatgatgttaactatgtgatctatataagtagtgtaataattcatgtattttgatatatgttccaactctgtctttgtgatgtctagtttcgtaatatctatagcatcctcaaaaaatatattcgcatatattcccaagtcttcagttctatcttctaaaaaatcttcaacgtatggaatataataatctattttacctcttctgatatcattaatgatatagtttttgacactatcttctgtcaattgattcttattcactatatctaagaaacggatagcgtccctaggacgaactactgccattaatatctctattatagcttctggacataattcatctattataccagaattaatgggaactattccgtatctatctaacatagttttaagaaagtcagaatctaagacttgatgttcatatattggttcatacatgaaatgatctctattgatgatagtgactatttcattctctgaaaattggtaactcattctatatatgctttccttgttgatgaaggatagaatatactcaatagaatttgtaccaacaaactgttctcttatgaatcgtatatcatcatctgaaataatcatgtaaggcatacatttaacaattagagacttgtctcctgttatcaatatactattcttgtgataatttatgtgtgaggcaaatttgtccacgttctttaattttgttatagtagatatcaaatccaatggagctacagttcttggcttaaacagatatagtttttctggaacaaattctacaacattattataaaggactttgggtagataagtgggatgaaatcctattttaattaatgcgatagccttgtcctcgtgcagatatccaaacgcttttgtgatagtatggcattcattgtctagaaacgctctacgaatatctgtgacagatatcatctttagagaatatactagtcgcgttaatagtactacaatttgtattttttaatctatctcaataaaaaaattaatatgtatgattcaatgtataactaaactactaactgttattgataactagaatcagaatctaatgatgacgtaaccaagaagtttatctactgccaatttagctgcattatttttagcatctcgtttagattttccatcggccttatcgaatactcttccgtcgatgtctacacaggcataaaatgtaggagagttactaggcccaactgattcaatacgaaaagaccaatctctcctagtaatttggcagtactcattaataacggtgacagggttagcatctttccaatcaataatttttttagccggaataacatcatcaaaagacttatgatcctctctcattgatttttcgcgggatacatcatctattatgacgtcagccatagcatcagcatccggcttatccgcctccgttgtcataaaccaacgaggaggaatatcgtcggagctgtacaccatagcactacgttgaagatcgtacagagctttattaacttctcgcttctccatattaagttgtctagttagttgtgcagcagtagctccttcgattccaatgtttttaatagccgcacacacaatctctgcgtcagaacgctcgtcaatatagatcttagacatttttagagagaactaacgcaaccagcaataaaactgaacctactttatcatttttttattcatcatcctctggtggttcgtcgttcctatcaaatgtagctctgattaacccgtcatctataggtgatgctggttctggagattctggaggagatggattattatctggaagaatctctgttatttccttgttttcatgtatcgattgcgttgtaacattaagattgcgaaatgctctaaatttgggaggcttaaagtgttgtttgcaatctctacacgcgtgtctaactagtggaggttcgtcagctgctctagtttgaatcatcatcggcgtagtattcctacttttacagttaggacacggtgtattgtatttctcgtcgagaacgttaaaataatcgttgtaactcacatcctttattttatctatattgtattctactcctttcttaatgcattttataccgaataagagatagcgaaggaattctttttcggtgccgctagtacccttaatcatatcacatagtgttttatattccaaatttgtggcaatagacggtttatttctatacgatagtttgtttctggaatcctttgagtattctataccaatattattctttgattcgaatttagtttcttcgatattagattttgtattacctatattcttgatgtagtactttgatgatttttccatggcccattctattaagtcttccaagttggcatcatccacatattgtgatagtaattctcggatatcagtagcggctaccgccattgatgtttgttcattggatgagtaactactaatgtatacattttccatttataacacttatgtattaactttgttcatttatattttttcattattatgttgatattaacaaaagtgaatatatatatgttaataattgtattgtggttatacggctacaattttataatgagtgaaagtcagtgtccgatgatcaatgacgatagctttactctgaaaagaaagtatcaaatcgatagtgcggagtcaacaataaaaatggataagaagaggataaagtttcagaatagagccaaaatggtaaaagaaataaatcagacaataagagcagcacaaactcattacgagacattgaaactaggatacataaaatttaagagaatgattatgactactactctagaagatatagcaccatctattccaaataatcagaaaacttataaactattctcggacatttcagccatcggcaaagcatcacagaatccgagtaagatggtatatgctctgctgctttacatgtttcccaatttgtttggagatgatcatagattcattcgttatagaatgcatccaatgagtaaaatcaaacacaagatcttctctcctttcaaacttaatcttattagaatattagtggaagaaagattctataataatgaatgcagatctaataaatggagaataattggaacacaagttgataaaatgttgatagctgaatctgataaatatacaatagatgcaaggtataacctaaaacccatgtatagaatcaagggagaatctgaagaagataccctctttatcaaacagatggtagaacaatgtgtgacatcccaggaattggtggaaaaagtgttgaagatactgtttagagatttgttcaagagtggagaatacaaagcgtacagatacgatgatgatgtagaaaatggatttattggattggatacactaaaattaaacattgttcatgatatagttgaaccatgtatgcctgttcgtaggccagtggctaagatactgtgtaaagaaatggtaaataaatactttgagaatccgctacatattattggtaaaaatcttcaagagtgcattgactttgttagtgaataggcatttcatctttctccaatactaattcaaattgttaaattaataatggatagtataaatagttattagttataagatagtaaaaataattattagaataagagtgtagtatcatagataactctcttctataaaaatggattttattcgtagaaagtatcttatatacacagtagaaaataatatagattttttaaaggatgatacattaagtaaagtaaacaattttaccctcaatcatgtactagctctcaagtatctagttagcaattttcctcaacacgttattactaaggatgtattagctaataccaatttttttgttttcatacatatggtacgatgttgtaaagtgtacgaagcggttttacgacacgcatttgatgcacccacgttgtacgttaaagcattgactaagaattatttatcgtttagtaacgcaatacaatcgtacaaggaaaccgtgcataaactaacacaagatgaaaaatttttagaggttgccgaatacatggacgaattaggagaacttataggcgtaaattatgacttagttcttaatccattatttcacggaggggaacccatcaaagatatggaaatcatttttttaaaactgtttaagaaaacagacttcaaagttgttaaaaaattaagtgttataagattacttatttgggcatacctaagcaagaaagatacaggcatagagtttgcggataatgatagacaaaatatatacactctatttcaacaaactggtagaatcgtccatagcaatctaacagaaacgtttagagattatatctttcccggagataagactagctattgggtgtggttaaacgaaagtatagctaatgatgcggatatcgttcttaatagacacgccattaccatgtatgataaaattcttagttatatatactctgagataaaacaaggacgcgttaataaaaacatgcttaagttagtttatatctttgagcctgaaaaagatatcagagaacttctgctagaaatcatatatgatattcctggagatatcctatctattattgatgcaaaaaacgacgattggaaaaaatattttattagtttttataaagctaattttattaacggtaatacatttattagtgatagaacgtttaacgaggacttattcagagttgttgttcaaatagatcccgaatatttcgataatgaacgaattatgtctttattctctacgagtgctgcggacattaaacgatttgatgagttagatattaataacagttatatatctaatataatttatgaggtgaacgatatcacattagatacaatggatgatatgaagaagtgtcaaatctttaacgaggatacgtcgtattatgttaaggaatacaatacatacctgtttttgcacgagtcggatcccatggtcatagagaacggaatactaaagaaactgtcatctataaaatccaagagtagacggctgaacttgtttagcaaaaacattttaaaatattatttagacggacaattggctcgtctaggtcttgtgttagatgattataaaggagacttgttagttaaaatgataaaccatcttaagtctgtggaggatgtatccgcattcgttcgattttctacagataaaaaccctagtattcttccatcgctaatcaaaactattttagctagttataatatttccatcatcgtcttatttcaaaggtttttgagagataatctatatcatgtagaagaattcttggataaaagcatccatctaaccaagacggataagaaatatatacttcaattgataagacacggtagatcatagaacagaccaaatatattattaataatttgtatatacatagatataattatcacacatttttgataaatgggaactgctgcaacaattcagactcccaccaaattaatgaataaagaaaatgcagaaatgattttggaaaaaattgttgatcatatagttatgtatattagtgacgaatcaagtgattcagaaaataatcctgaatatattgattttcgtaacagatacgaagactatagatctctcattataaaaagtgatcacgagtttgtaaagctatgtaaaaatcatgcggagaaaagttctccagaaacgcaacaaatgattatcaaacacatatacgaacaatatcttattccagtatctgaagtactattaaaacctataatgtccatgggtgacataattacatataacggatgtaaagacaatgaatggatgctagaacaactctctaccctaaactttaacaatctccgcacatggaactcatgtagcataggcaatgtaacgcgtctgttttatacattttttagttatctgatgaaagataaactaaatatataagtataatcccattctaatactttaacctgatgtattagcatcttattagaatattaacctaactaaaagacataacataaaaactcattacatagttgataaaaagcggtaggatataaatattatggctgccaccgttccgcgttttgacgacgtgtacaaaaatgcacaaagaagaattctagatcaagaaacattttttagtagaggtctaagtagaccgttaatgaaaaacacatatctatttgataattacgcgtatggatggataccagaaactgcaatttggagtagtagatacgcaaacctagatgctagtgactattatcccatttcgttgggattacttaaaaagttcgagtttctcatgtctctatataaaggtcctattcccgtatatgaagaaaaagtaaatactgaattcatagccaatggatcgttctctggtagatacgtatcatatcttcgaaagttttctgcccttccaacaaacgagtttattagttttttgttactgacttccattccaatctataatatcttgttctggtttaaaaacacacagtttgatattactaaacacacattattcagatacgtctatacagataatgccaaacacctggcgttggctaggtatatgcatcaaacaggagactataagcctttgtttagtcgtctcaaagagaattatatatttaccggtcccgttccaataagtatcaaagatatagatcaccctaatcttagtagagcaagaagtccatccgattatgagacattagctaatattagtactatattgtactttaccaagtatgatccggtattaatgtttttattgttttacgtacctgggtattcaattactacaaaaattactccagccgtagaatatctaatggataaactgaatctaacaaagagcgacgtacaactgttgtaaattattttatgcttcgtaaaatgtaggttttgaaccaaacattctttcaaagaatgagatgcataaaactttattatccaatagattgactatttcggacgtcaatcgtttaaagtaaacttcgtaaaatattctttgatcactgccgagtttaaaacttctatcgataattgtctcatatgttttaatatttacaagttttttggtccatggtacattagccggacaaatatatgcaaaataatatcgttctccaagttctatagtttctggattatttttattatattcagtaactaaatacatattagggttatctgcggatttataatttgagtgatgcattctactcaacataaataattctagaggagacgatctactatcaaattcggatcgtaaatctgtttctaaagaacggagaatatctatacatacctgattagaattcatccgtccttcagacaacatctcagacagtctggttttgtacatcttaatcatattcttatgaaacttggaaacatctcttctagtttcactagtacctttattaattctctcaggtacagattttgaattcgacgatgctgagtatttcatcgttgtatatttcttcttcgattgcataatcagattcttatataccgcctcaaactctattttaaaattattaaacaatactctattattaatcagtcgttctaactctttcgctatttctatagacttatctacatcttgactgtctatctctgtaaacacggagtcggtatctccatacacgctacgaaaacgaaatctgtaatctataggcaacgatgttttcacaatcggattaatatctctatcgtccatataaaatggattacttaatggattggcaaaccgtaacataccgttagataactctgctccatttagtaccgattctagatacaagatcattctacgtcctatggatgtgcaactcttagccgaagcgtatgagtatagagcactatttctaaatcccatcagaccatatactgagttggctactatcttgtacgtatattgcatggaatcatagatggccttttcagttgaactggtagcctgttttagcatctttttatatctggctctctctgccaaaaatgttcttaatagtctaggaatggttccttctatcgatctatcgaaaattgctatttcagagatgaggttcggtagtctaggttcacaatgaaccgtaatatatctaggaggtggatatttctgaagcaatagctgattatttatttcttcttccaatctattggtactaacaacgacaccgactaatgtttccggagatagatttccaaagatacacacattaggatacagactgttataatcaaagattaatacattattactaaacattttttgttttggagcaaataccttaccgccttcataaggaaacttttgttttgtttctgatctaactaagatagttttagtttccaacaatagctttaacagtggacccttgatgactgtactcgctctatattcgaataccatggattgaggaagcacatatgttgacgcacccgcgtctgtttttgtttctactccataatactcccacaaatactgacacaaacaagcatcatgaatacagtatctagccatatctaaagctatgtttagattataatccttatacatctgagctaaatcaacgtcatcctttccgaaagataatttatatgtatcattaggtaaagtaggacataatagtacgactttaaatccattttcccaaatatctttacgaattactttacatataatatcctcatcaacagtcacataattacctgtggttaaaacctttgcaaatgcagcggctttgcctttcgcgtctgtagtatcgtcaccgatgaacgtcatttctctaactcctctatttaatactttacccatgcaactgaacgcgttcttggatatagaatccaatttgtacgaatccaatttttcaaatttttgaatgaatgaatatagatcgaaaaatatagttccattattgttattaacgtgaaacgtagtattggccatgccgcctactcccttatgactagactgatttctctcataaatacagagatgtacagcttcctttttgtccggagatctaaagataattttctctcctgttaataactctagacgattagtaatatatctcagatcaaagttatgtccgttaaaggtaacgacgtagtcgaacgttagttccaacaattgtttagctattcgtaacaaaactatttcagaacatagaactagttctcgttcgtaatccatttccattagtgactgtatcctcaaacatcctctatcgacggcttcttgtatttcctgttccgttaacatctcttcattaatgagcgtaaacaataatcgtttaccacttaaatcgatataacagtaacttgtatgcgagattgggttaataaatacagaaggaaacttcttatcgaagtgacactctatatctagaaataagtacgatcttgggatatcgaatctaggtatttttttagcgaaacagttacgtggatcgtcacaatgataacatccattgttaatctttgtcaaatattgctcgtccaacgagtaacatccgtctggagatatcccgttagaaatataaaaccaactaatattgagaaattcatccatggtggcattttgtatgctgcgtttctttggctcttctatcaaccacatatctgcgacggagcattttctatctttaatatctagattataacttattgtctcgtcaatgtctatagttctcatctttcccaacggcctcgcattaaatggaggaggagacaatgactgatatatttcgtccgtcactacgtaataaaagtaatgaggaaatcgtataaatacggtctcgccatttcgacatctggatttcagatataaaaatctgttttcaccgtgactttcaaaccaattaatgcaccgaacatccatttatagaatttagaaatatattttcatttaaatgaatcccaaacattggggaagagccgtatggaccattatttttatagtactttcgcaagcgggtttagacggcaacatagaagcgtgtaaacgaaaactatatactatagttagcactcttccatgtcctgcatgtagacggcacgcgactatcgctatagaggacaataatgtcatgtctagcgatgatctgaattatatttattattttttcatcagattatttaacaatttggcatctgatcccaaatacgcgatcgatgtgacaaaggttaaccctttataaacttaacccattataaaacttatgattagtcacaactgaaataaccgcgtgattattttttggtataattctacacggcatggtttctgtgactatgaattcaacccccgttacattagtgaaatctttaacaaacagcaagggttcgtcaaagacataaaactcattgtttacaatcgaaatagaccccctatcacacttaaaataaaaaatatccttatcctttaccaccaaataaaattctgattggtcaatgtgaatgtattcacttaacagttccacaaatttatttattaactccgaggcacatacatcgtcggtattttttatggcaaactttactcttccagcatccgtttctaaaaaaatattaacgagttccatttatatcatccaatattattgaaatgacgttgatggacagatgatacaaataagaaggtacggtacctttgtccaccatctcctccaattcatgctctattttgtcattaactttaatgtatgaaaacagtacgccacatgcttccatgacagtgtgtaacactttggatacaaaatgtttgacattagtataattgtccaagactgtcaatctataatagatagtagctataatatattctatgatggtattgaagaagatgacaaccttggcatattgatcatttaacacagacatggtatcaacagatagcttgaatgaaagagaatcagtaattggaataagcgtcttctcgatagagtgtccgtataccaacatgtctgatattttgatgtattccattaaattatttagttttttctttttattctcgttaaacagcatttctgtcaacggaccccaacatcgttgaccgattaagttttgattgatttttccgtgtaaggcgtatctagtcagatcgtatagcctatccaataatccatcgtctgtgtgtagatcacatcgtacactttttaattctctatagaagagcgacagacatctggagcaattacagacagcaatttctttattctctacagatgtaagatacttgaagacattcctatgatgatgcagaattttggataacacggtattgatggtatctgttaccataattcctttgatggctgatagtgtcagagcacaagatttccaatctttgacaatttttagcaccattatctttgttttgatatctatatcagacagcatggtgcgtctgacaacacagggattaagacggaaagatgaaatgattctctcaacatcttcaatagataccttgctattttttctggcattatctatatgtgcgagaatatcctctagagaatcagtatcctttttgatgatagtggatctcaatgacatgggacgtttaaaccttcttattctatcaccagattgcatggtgatttgtcttctttcttttatcataatgtaatctctaaattcatcggcaaattgtctatatctaaaatcataatatgagatgtttacctctacaaatatctgttcgtccaatgttagagtatttacatcagttttgtattccaaattaaacatggcaacggatttaattttatattcctctattaagtcctcgtcgataataacagaatgtagataatcatttaatccgtcgtacatggttggaagatgcttgttgacaaaatctttaattgtcttgatgaaggtgggactatatctaacatcttgattaataaaatttataacattgtccataggatactttgtaactagttttatacacatctcttcatcggtaagtttagacagaatatcgtgaacaggtggtatattatattcatcagatatacgaagaacaatgtccaaatctatattgtttaatatattatatagatgtagcgtagctcctacaggaatatctttaactaagtcaatgatttcatcaaccgttagatctattttaaagttaatcatataggcattgatttttaaaaggtatgtagccttgactacattctcattaattaaccattccaagtcattgtgtgtaagaagattatattctatcataagcttgactacatttggtcccgataccattaaagaattcttatgatataaggaaacagattttaggtactcatctactctacaagaattttggagagccttaacgatatcagtgacgtttattatttcaggaggaaagaatctaacattgagaatatcggaattaatagcttccagatacagtgattttggcaatagtccgtgtaatccataatccagtaacacgagctggtgcttgctagacaccttttcaatgtttaatttttttgaaataagctttgataaagccttcctcgcaaattccggatacatgaacatgtcggcgacatgattaagtattgttttttcattatttttatattttctcaacaagttctcaataccccaatagatgatagaatatcacccaatgcgtccatgttgtctatttccaacaggtcgctatatccaccaatagaagtttttccaaaaaagattctaggaacagttctaccaccagtaatttgttcaaaataatcccgcaattcattttcgggtttaaattctttaatatcgacaatttcatacgctcctcttttgaaactaaacttatttagaatatccagtgcatttctacaaaaaggacatgtatacttgacaaaaattgtcactttgttattggccaacctttgttgtacaaattcctcggccattttaatatttaagtgatataaaactatctcgacttatttaactctttagtcgagatatatggacgcagatagctatatgatagccaactacagaaggcaaacgctataaaaaacataattacgacgagcatatttataaatatttttattcagcattacttgatatagtaatattaggcacagtcaaacattcaaccactctcgatacattaactctctcattttctttaacaaattctgcaatatcttcgtaaaaagattcttgaaactttttagaatatctatcgactctagatgaaatagcgttcgtcaacatactatgttttgtatacataaaggcgcccattttaacagtttctagtgacaaaatgctagcgatcctaggatcctttagaatcacatagattgacgattcgtctctcttagtaactctagtaaaataatcatacaatctagtacgcgaaataatattatccttgacttgaggagatctaaacaatctagttttgagaacatcgataagttcatcgggaatgacatacatactatctttaatagaactcttttcatccagttgaatggattcgtccttaaccaactgattaatgagatcttctattttatcattttccagatgatatgtatgtccattaaagttaaattgtgtagcgcttctttttagtctagcagccaatactttaacatcactaatatcgatatacaaaggagatgatttatctatggcattaagaattcgtttttcgacatccgtcaaaaccaattcctttttgcctgtatcatccagttttccatcctttgtaaagaaattattttctactagactattaataagactgataaggattcctccataattgcacaatccaaactttttaacaaaactagactttacgagatctacaggaatgcgtacttcaggttttttagcttgtgattttttcttttgcggacattttctagtaaccaactcatctaccatttcattgattttagcagtgaaataagctttcaatgcacgggcactgatactattgaaaacgagttgatcttcaaattccgccatttaagttcaccaaacaacttttaaatacaaatatatcaatagtagtagaataagaactataaaaaaaataataattaaccaaccccaacaaccggtattattagttgatgtggtagttttctcatcacttagaacagatttaacaatttctataaagtctgtcaaatcatcttccggagaccccataaatacaccaaatatagcggcgtacaacttatccatttatacattgaatattggcttttctttatcgctatcttcatcatattcatcatcaatatcaacaagtcccagattacgagccagatcttcttctacattttcagtcattgatacacgttcactatctccagagagtccgataacgttagccaccacttctctatcaatgattagtttcttgagcgcgaaagtaatttttgtttccgttccggatctatagaagacgataggtgtgataattgccttggccaattgtctttctcttttactgagtgattctagttcaccttctatagatctgagaatggatgattctccagtcgaaacatattctaccatggatccgtttaatttgttgatgaagatggattcatccttaaatgttttctctgtaatagtttccaccgaaagactatgcaaagaatttggaatgcgttccttgtgcttaatgtttccatagacggcttctagaagttgatacaacataggactagccgcggtaacttttatttttagaaagtatccatcgcttctatcttgtttagatttatttttataaagtttagtctctccttccaacataataaaagtggaagtcatttgactagataaactatcagtaagttttatagagatagacgaacaattagcgtattgagaagcatttagtgtaacgtattcgatacattttgcattagatttactaatcgattttgcatactctataacacccgcacaagtctgtagagaatcgctagatgcagtaggtcttggtgaagtttcaactctcttcttgattaccttactcatgattaaacctaaataattgtactttgtaatataatgatatatattttcactttatctcatttgagaataaaaatgtttttgtttaaccactgcatgatgtacagatttcggaatcgcaaaccaccagtggttttattttatccttgtccaatgtgaattgaatgggagcggatgcgggtttcgtacgtagatagtacattcccgtttttagaccgagactccatccgtaaaaatgcatactcgttagtttggaataactcggatctgctatatggatattcatagattgactttgatcgatgaaggctcccctgtctgcagccatttttatgatcgtcttttgtggaatttcccaaatagttttataaactcgcttaatatcttctggaaggtttgtattctgaatggatccaccatctgccataatcctattcttgatctcatcattccataattttctctcggttaaaactctaaggagatgcggattaactacttgaaattctccagacaatactctccgagtgtaaatattactggtatacggttccaccgactcattatttcccaaaatttgagcagttgatgcagtcggcataggtgccaccaataaactatttctaagaccgtatgttctgattttatcttttagaggttcccaattccaaagatccgacggtacaacattccaaagatcatattgtagaataccgttactggcgtacgatcctacatatgtatcgtatggtccttccttctcagctagttcacaactcgcctctaatgcaccgtaataaatggtttcgaagatcttcttatttagatcttgtgcttccaggctatcaaatggataatttaagagaataaacgcgtccgctaatccttgaacaccaataccgataggtctatgtctcttattagagatttcagcttctggaataggataataattaatatctataattttattgagatttctgacaattactttgaccacatccttcagtttgagaaaatcaaatcgcccatctattacaaacatgttcaaggcaacagatgccagattacaaacggctacctcattagcatccgcatattgtattatctcagtgcaaagattactacacttgatagttcctaaattttgttgattactctttttgttacacgcatccttataaagaatgaatggagtaccagtttcaatctgagattctataatcgctttccagacgactcgagcctttattatagatttgtatctcctttctctttcgtatagtgtatacaatcgttcgaactcgtctccccaaacattgtccaatccaggacattcatccggacacatcaacgaccactctccgtcatccttcactcgtttcataaagagatcaggaatccaaagagctataaatagatctctggttctatgttcctcgtttcctgtattctttttaagatcgaggaacgccataatatcagaatgccacggttccaagtatatggccataactccaggccgtttgtttcctccctgatctatgtatctagcggtgttattataaactctcaacattggaataataccgtttgatataccattggtaccggagatatagcttccactggcacgaatattactaattgatagacctattccccctgccattttagagattaatgcgcatcgttttaacgtgtcatagataccctctatgctatcatcgatcatgttaagtagaaaacagctagacatttggtgacgactagttcccgcattaaataaggtaggagaagcgtgcgtaaaccatttttcagaaagtagattgtacgtctcaatagctgagtctatatcccattgatgaattcctactgcgacacgcattaacatgtgctgaggtctttcaacgatcttgttgtttattttcaacaagtaggatttttccaaagttttaaaaccaaaatagttgtatgaaaagtctcgttcgtaaataataaccgagttgagtttatccttatatttgttaactatatccatggtgatacttgaaataatcggagaatgtttcccatttttaggattaacatagttgaataaatcctccatcacttcactaaatagtttttttgtttccttgtgtagatttgatacggctattctggcggctagaatggcataatccggatgttgtgtagtacaagtggctgctatttcggctgccagagtgtccaattctaccgttgttactccattatatattccttgaataaccttcatagctattttaataggatctatatgatccgtgtttaagccataacataattttctaatacgagacgtgattttatcaaacatgacattttccttgtatccatttcgtttaatgacaaacatttttgttggtgtaataaaaaaattatttaacttttcattaatagggatttgacgtatgtagcgtacaaaatgattgttcctggtatatagataaagagtcctatatatttgaaaatcgttacggctcgattaaactttaatgattgcatagtgaatatatcattaggatttaactccttgactatcatggcggcgccagaaattaccatcaaaagcattaatacagttataccgatcgcagttagaacggttatagcatccaccatttatatctaaaaattagatcaaagaatatgtgacaaagtcctagttgtatactgagaattgacgaaacaatgtttcttacatatttttttcttattagtaaccgacttaatagtaggaactggaaaactagacttgattattctataagtatagatacccttccaaataatattctctttgataaaagttccagaaaatgtagaattttttaaaaagttatcttttgctattaccaagattgtgtttagacgcttattattaatatgagtgatgaaatccacaccgcctctagatatcgcctttatttccacattagatggtaaatccaatagtgaaactatctttttaggaatgtatggactcgcgtttagaggagtaaacgtcttaggcgtcggaaaggatgattcatcaaacgaataaacaatttcacaaatggatgttaatgtattagtaggaaattttttgacgctattggaattgaagattctaatggatgatgttctacctatttcatccgataacatgttaatttccgacaccaacggttttaatatttcgatgatatacggtagtctctctttcggacttatatagcttattccacaatacgagtcattatatactccaaaaaacaaaataactagtataaaatctgtatcgaatgggaaaaacgaaattatcgacataggtatagaatccggaacattgaacgtattaatacttaattctttttctgtggtaagtaccgataggttattgacattgtatggttttaaatattctataacttgagacttgatagatattagtgatgaattgaaaattatttttatcaccacgtgtgtttcaggatcatcgtcgacgcccgtcaaccaaccgaacggagtaaaataaatatcattaatatatgctctagatattagtatttttatcaatcctttgattatcatcttctcgtaggcgaatgattccatgatcaagagtgatttaagaacatcctccggagtattaatgggcttagtaaacagtccatcgttgcaataataaaagttatccaagttaaaggatattatgcattcgtttaaagatatcacctcatctgacggagacaattttttggtaggttttagagactttgaagctacttgtttaacaaagttattcatcgtcgtctactattctatttaattttgtagttaatttatcacatatcacattaattgactttttggtccacttttccatacgtttatattcttttaatcctgcgttatccgtttccgttatatccagggatagatcttgcaagttaaatagaatgctcttaaataatgtcattttcttatccgctaaaaatttaaagaatgtataaacctttttcagagatttgaaactcttaggtggtgtcctagtacacaatatcataaacaaactaataaacattccacattcagattccaacagctgattaacttccacattaatacagcctattttcgctccaaatgtacattcgaaaaatctgaataaaacatcgatgtcacaatttgtattatccaatacagaatgtttgtgattcgtgttaaaaccatcggagaaggaatagaaataaaaattattatagtggtggaattcagttggaatattgcctccggagtcataaaaggatactaaacattgttttttatcataaattacacatttccaatgagacaaataacaaaatccaaacattacaaatctagaggtagaacttttaattttgtctttaagtatatacgataagatatgtttattcataaacgcgtcaaatttttcatgaatcgctaaggagtttaagaatctcatgtcaaattgtcctatataatccacttcggatccataagcaaactgagagactaagttcttaatacttcgattgctcatccaggctcctctctcaggctctattttcatcttgacgacctttggattttcaccagtatgtattcctttacgtgataaatcatcgattttcaaatccatttgtgagaagtctatcgccttagatactttttcccgtagtcgaggtttaaaaaaatacgctaacggtatactagtaggtaactcaaagacatcatatatagaatggtaacgcgtctttaactcgtcggttaactctttcttttgatcgagttcgtcgctactattgggtctgctcaggtgccccgactctactagttccaacatcataccgataggaatacaagacactttgccggcggttgtagatttatcatatttttccactacatatccgttacaatttgttaaaaatttagatacatctatattgctacataatccagctagtgaatatatatgacataataaattggtaaatcctagttctggtattttactaattactaaatctgtatatctttccatttatcatggaaaagaatttaccagatatcttcttttttccaaactgcgttaatgtattctcttacaaatattcacaagatgaattcagtaatatgagtaaaacggaacgtgatagtttctcattggccgtgtttccagttataaaacatagatggcataacgcacacgttgtaaaacataaaggaatatacaaagttagtacagaagcacgtggaaaaaaagtatctcctccatcactaggaaaacccgcacacataaacctaaccgcgaagcaatatatatacagtgaacacacaataagctttgaatgttatagttttctaaaatgtataacaaatacagaaatcaattcgttcgatgagtatatattaagaggactattagaagctggtaatagtttacagatattttccaattccgtaggtaaacgaacagatactataggtgtactagggaataagtatccatttagcaaaattccattggcctcattaactcctaaagcacaacgagagatattttcagcgtggatttctcatagacctgtagttttaactggaggaactggagtgggtaagacgtcacaggtacccaagttattgctttggtttaattatttatttggtggattctctactctagataaaatcactgactttcacgaaagaccagtcattctatctcttcctaggatagctttagttagattgcatagcaataccattttaaaatcattgggatttaaggtactagatggatctcctatttctttacggtacggatctataccggaagaattaataaacaaacaaccaaaaaaatatggaattgtattttctacccataagttatctctaacaaaactatttagttatggcactcttattatagacgaagttcatgagcatgatcaaataggagatattattatagcagtagcgagaaagcatcatacgaaaatagattctatgtttttaatgactgccacgttagaggatgacagggaacggctaaaagtatttttacctaatcccgcatttatacatattcctggagatacactgtttaaaattagcgaggtatttattcataataagataaatccatcttccagaatggcatacatagaagaagaaaagagaaatttagttactgctatacagatgtatactcctcctgatggatcatccggtatagtctttgtggcatccgttgcacagtgtcacgaatataaatcatatttagaaaaaagattaccgtatgatatgtatattattcatggtaaggtcttagatatagacgaaatattagaaaaagtgtattcatcacctaatgtatcgataattatttctactccttatttggaatccagcgttactatacgcaatgttacacacatttatgatatgggtagagtttttgtccccgctccttttggaggatcgcaacaatttatttctaaatctatgagagatcaacgaaaaggaagagtaggaagagttaatcctggtacatacgtctatttctatgatctgtcttatatgaagtctatacagcgaatagattcagaatttctacataattatatattgtacgctaataagtttaatctaacactccccgaagatttgtttataatccctacaaatttggatattctatggcgtacaaaggaatatatagactcgttcgatattagtacagaaacatggaataaattattatccaattattatatgaagatgatagagtatgctaaactttatgtactaagtcctattctcgctgaggagttggataactttgagaggacgggagaattaactagtattgtacgagaagccattttatctctaaatttacaaattaagattttaaattttaaacataaagatgatgatacgtatatacacttttgtaaaatattattcggtgtctataacggaacaaacgctactatatattatcatagacctctaacgggatatatgaatatgatttcagatactatatttgttcctgtagataataactaaaaatcaaactctaatgaccacatctttttttagagatgaaaaattttccacatctccttttgtagacacgactaaacattttgcagaaaaaagtttattagtgtttagataatcgtatacttcatcagtgtagatagtaaatgtgaacagataaaaggtattcttgctcaatagattggtaaattccatagaatatattaatcctttcttcttgagatcccacatcatttcaaccagagacgttttatccaatgatttacctcgtactataccacatacaaaactagattttgcagtgacgtcgtacctggtattcctaccaaacaaaattttacttttagttcttttagaaaattctaaggtagaatctctatttgccaatatgtcatctatggaattaccactagcaaaaaatgatagaaatatatattgatacatcgcagctggttttgatctactatactttaaaaacgaatcagattccataattgcctgtatatcatcagctgaaaaactatgttttacacgtattccttcggcatttctttttaatgatatatcttgtttagacaatgataaagttatcatgtccatgagagacgcgtctccgtatcgtataaatatttcattagatgttagacgcttcattaggggtatacttctataaggtttcttaatcagtccatcattggttgcgtcaagaactactatcggatgttgttgggtatctctagtgttacacatggccttactaaagtttgggtaaataactatgatatctctattaattatagatgcatatatttcattcgtcaaggatattagtatcgacttgctatcgtcattaatacgtgtaatgtaatcatataaatcatgcgatagccaaggaaaatttaaatagatgttcatcatataatcgtcgctataattcatattaatacgttgacattgactaatttgtaatatagcctcgccacgaagaaagctctcgtattcagtttcatcgataaaggataccgttaaatataactggttgccgatagtctcatagtctattaagtggtaagtttcgtacaaatacagaatccctaaaatattatctaatgttggattaatctttaccataactgtataaaatggagacggagtcataactattttaccgtttgtacttactggaatagatgaaggaataatctccggacatgctggtaaagacccaaatgtctgtttgaagaaatccaatgttccaggtcctaatctcttaacaaaaattacgatattcgatcccgatatcctttgcattctatttaccagcatatcacgaactatattaagattatctatcatgtctattctcccaccgttatataaatcgcctccgctaagaaacgttagtatatccatacaatggaatacttcatttctaaaatagtattcgttttctaattctttaatgtgaaatcgtatactagaaagggaaaaattatctttgagttttccgttagaaaagaaccacgaaactaatgttctgattgcgtccgattccgttgctgaattaatggatttacaccaaaaactcatataacttctagatgtagaagcattcgctaaaaaattagtagaatcaaaggatataagtagatgttccaacaagtgagcaattcccaagatttcatctatatcattctcgaatccgaaattagaaattcccaagtagatatcctttttcatccgatcgttgatgaaaatacgaactttattcggtaagacaatcatttactaaggagtaaaataggaagtaatgttcgtatgtcgttatcatcgtataaattaaaggtgtgttttttaccattaagtgacattataattttaccaatattggaattataatataggtgtatttgcgcactcgcgacggttgatgcatcggtaaatatagctgtatctaatgttctagtcggtatttcatcatttcgctgtctaataatagcgttttctctatctgtttccattacagctgcctgaagtttattggtcggataatatgtaaaataataagaaatacatacgaataacaaaaataaaataagatataataaagatgccatttagagatctaattttgtttaacttgtccaaattcctacttacagaagatgaggaatcgttggagatagtgtcttccttatgtagaggatttgaaatatcttataatgacttgataacttactttccagataggaaataccataaatatatttataaagtatttgaacatgtagatttatcggaggaattaagtatggaattccatgatacaactctgagagatttagtctatcttagattgtacaagtattccaagtgtatacggccgtgttataaattaggagataatctaaaaggcatagttgttataaaggacaggaatatttatattagggaagcaaatgatgacttgatagaatatctcctcaaggaatacactcctcagatttatacatattctaatgagcgcgtccccataactggttcaaaattaattctttgtggattttctcaagttacatttatggcgtatacaacgtcgcatataacaacaaataaaaaggtagatgttctcgtttccaaaaaatgtatagatgaactagtcgatccaataaattatcaaatacttcaaaatttatttgataaaggaagcggaacaataaacaaaatactcaggaagatattttattcggtaacaggtggccaaactccataggtagctttttctatttcggattttagaatttccaaattcaccagcgatttatcggttttggtgaaatccaaggatttattaatgtccacaaatgccatttgttttgtctgtggattgtatttgaaaatggaaacgatgtagttagatagatgcgctgcgaagtttcctattagggttccgcgcttcacgtcacccagcatacttgaatcaccatcctttaaaaaaaatgataagatatcaacatggagtatatcatactcgaattttaattcttctactgactcactgacattttcacaaatactacaatacggtttaccgaaaataatcagtacgttcttcatttatgggtatcaaaaacttaaaatcgttactgctggaaaataaatcactgacgatattagatgataatttatacaaagtatacaatggaatatttgtggatacaatgagtatttatatagccgtcgccaattgtgtcagaaacttagaagagttaactacggtattcataaaatacgtaaacggatgggtaaaaaagggagggcatgtaaccctttttatcgatagaggaagtataaaaattaaacaagacgttagagacaagagacgtaaatattctaaattaaccaaggacagaaaaatgttagaattagaaaagtgtacatccgaaatacaaaatgttaccggatttatggaagaagaaataaaggcagaaatgcaattaaaaatcgataaactcacatttcaaatatatttatctgattctgataacataaaaatatcattgaatgagatactaacacatttcaacaataatgagaatgttacattattttattgtgatgaacgagacgcagaattcgttatgtgtctcgaggctaaaacacatttctctaccacaggagaatggccgttgataataagtaccgatcaggatactatgctatttgcatctgctgataatcatcctaagatgataaaaaacttaactcaactgtttaaatttgttccctcggcagaggataactatttagcaaaattaacggcgttagtgaatggatgtgatttctttcctggactctatggggcatctataacacccaccaacttaaacaaaatacaattgtttagtgattttacaatcgataatatagtcactagtttggcaattaaaaattattatagaaagactaactctaccgtagacgtgcgtaatattgttacgtttataaacgattacgctaatttagacgatgtctactcgtatattcctccttgtcaatgcactgttcaagaatttatattttccgcattagatgaaaaatggaatgaatttaaatcatcttatttagaaagcgtgccgttaccctgccaattaatgtacgcgttagaaccacgcaaggagattgatgtttcagaagttaaaactttatcatcttatatagatttcgaaaatactaaatcagatatcgatgttataaaatctatatcctcgatcttcggatattctaacgaaaactgtaacacgatagtattcggcatctataaggataatttactactgagtataaataattcattttactttaacgatagtctgttaataaccaatactaaaagtgataatataataaatataggttactagattaaaaatggtgttccaactcgtgtgctctacatgcggtaaagatatttctcacgaacgatataaattgattatacgaaaaaaatcattaaaggatgtactcgtcagtgtaaagaacgaatgttgtaggttaaaattatctacacaaatagaacctcaacgtaacttaacagtgcaacctctattggatataaactaatatggatccggttaattttatcaagacatatgcgcctagaggttctattatttttattaattataccatgtcattaacaagtcatttgaatccatcgatagaaaaacatgtgggtatttattatggtacgttattatcggaacacttggtagttgaatctacctatagaaaaggagttcgaatagtcccattggatagtttttttgaaggatatcttagtgcaaaagtatacatgttagagaatattcaagttatgaaaatagcagctgatacgtcattaactttattgggtattccgtatggatttggtcatgatagaatgtattgttttaaattggtagctgactgttataaaaatgccggtattgatacatcgtctaaacgaatattgggcaaagatatttttctgagccaaaacttcacagacgataatagatggataaagatatatgattctaataatttaacattttggcaaattgattaccttaaagggtgagttaatatgcataactactcctccgttgttttttccctcgttctttttcttaacgttgtttgccatcactctcataatgtaaagatattctaaaatggtaaacttttgcatatcggacgcagaaattggtataaatgttgtaattgtattatttcccgtcaatggactagtcacagctccatcagttttatatcctttagagtatttctcactcgtgtctaacattctagagcattccatgatctgtttatcgttgatattggccggaaagatagattttttattttttattatattactattggcaattgtagatataacttctggtaaatatttttctaccttttcaatctcttctattttcaagccggctatatattctgctatattgttgctagtatcaataccttttctggctaagaagtcatatgtggtattcactatatcagttttaactggtagttccattagcctttccacttctgcagaataatcagaaattggttctttaccagaaaatccagctactataataggctcaccgatgatcattggcaaaatcctatattgtaccagattaatgagagcatatttcatttccaataattctgctagttcttgagacattgatttatttgatgaatctagttggttctctagatactctaccatttctgccgcatacaataacttgttagataaaatcagggttatcaaagtgtttagcgtggctagaatagtgggcttgcatgtattaaagaatgcggtagtatgagtaaaccgttttaacgaattatatagtctccagaaatctgtggcgttacatacatgagccgaatgacatcgaagattgtccaatatttttaatagctgctctttgtccattatttctatatttgactcgcaacaattgtagataccattaatcaccgattcctttttcgatgccggacaatagcacaattgtttagctttggactctatgtattcagaattaatagatatatctctcaatacagattgcactatacattttgaaactatgtcaaaaattgtagaacgacgctgttctgcagccatttaactttaaataatttacaaaaatttaaaatgagcatccgtataaaaatcgataaactgcgccaaattgtggcatatttttcagagttcagtgaagaagtgtctataaatgtagactcgacggatgagttaatgtatatttttgccgccttgggcggatctgtaaacatttgggcaattatacctctaagtgcatcagtgttttaccgaggagccgaaaatattgtgtttaatcttcctgtgtccaaggtaaaatcgtgtttgtgtagttttcacaatgatgccatcatagatatagaacctgatctggaaaataatctagtaaaactttctagttatcatgtagtaagtgtcgattgtaacaaggaactgatgcctattaggacagatactactatttgtctaagtatagatcaaaagaaatcttacgtgtttaattttcacaagtatgaagaaaaatgttgtggtagaaccgtcattcatctagaatggttgttgggctttatcaagtgtattagtcagcatcagcatctggctattatgtttaaagatgacaatattattatgaagactcctggtaatactgatgcgttttccagggaatattctatgactgaatgttctcaagaactacaaaagttttctttcaaaatagctatctcgtctctcaacaaactacgaggattcaaaaagagagtcaatgtttttgaaactagaatcgtaatggataatgacgataacattttaggaatgttgttttcggatagagttcaatcctttaagatcaacatctttatggcgtttttagattaatactttcaatgagataaatatgggtggcggagtaagtgttgagctccctaaacgggatccgcctccgggagtacccactgatgagatgttattaaacgtggataaaatgcatgacgtgatagctcccgctaagcttttagaatatgtgcatataggaccactagcaaaagataaagaggataaagtaaagaaaagatatccagagtttagattagtcaacacaggacccggtggtctttcggcattgttaagacaatcgtataatggaaccgcacccaattgctgtcgcacttttaatcgtactcattattggaagaaggatggaaagatatcagataagtatgaagagggtgcagtattagaatcgtgttggccagacgttcacgacactggaaaatgcgatgttgatttattcgactggtgtcagggggatacgttcgatagaaacatatgccatcagtggatcggttcagcctttaataggagtaatagaactgtagagggtcaacaatcgttaataaatctgtataataagatgcaaacattatgtagtaaagatgctagtgtaccaatatgcgaatcatttttgcattatttacgcgcacacaatacagaagatagcaaagagatgatcgattatattctaagacaacagtctgcggactttaaacagaaatatatgagatgtagttatcccactagagataagttagaagagtcattaaaatatgcggaacctcgagaatgttgggatccagagtgttcgaatgccaatgttaatttcttactaacacgtaattataataatttaggactttgcaatattgtacgatgtaataccagcgtgaacaacttacagatggataaaacttcctcattaagattgtcatgtggattaagcaatagtgatagattttctactgttcccgtcaatagagcaaaagtagttcaacataatattaaacactcgttcgacctaaaattgcatttgatcagtttattatctctcttggtaatatggatactaattgtagctatttaaatgggtgccgcggcaagcatacagacgacggtgaatacactcagcgaacgtatctcgtctaaattagaacaagaagcgaacgctagtgctcaaacaaaatgtgatatagaaatcggaaatttttatatccgacaaaaccatggatgtaacctcactgttaaaaatatgtgctctgcggacgcggatgctcagttggatgctgtgttatcagccgctacagaaacatatagtggattaacaccggaacaaaaagcatacgtgccagctatgtttactgctgcgttaaacattcagacgagtgtaaacactgttgttagagattttgaaaattatgtgaaacagacttgtaattctagcgcggtcgtcgataacaaattaaagatacaaaacgtaatcatagatgaatgttacggagccccaggatctccaacaaatttggaatttattaatacaggatctagcaaaggaaattgtgccattaaagcgttgatgcaattgacgactaaggccactactcaaatagcacctagacaagttgctggtacaggagttcagttttatatgattgttatcggtgttataatattggcagcgttgtttatgtactatgccaagcgtatgttgttcacatccaccaatgataaaatcaaacttattttagccaataaggaaaacgtccattggactacttacatggacacattctttagaacttctccgatggttattgctaccacggatatgcaaaactgaaaatatattgataatattttaatagattaacatggaagttatcgctgatcgtctagacgatatagtgaaacaaaatatagcggatgaaaaatttgtagattttgttatacacggtctagagcatcaatgtcctgctatacttcgaccattaattaggttgtttattgatatactattatttgttatagtaatttatatttttacggtacgtctagtaagtagaaattatcaaatgttgttggtggtgctagtcatcacattaactattttttattactttatactataatagtactagactgacttctaacaaacatctcacctgccataaataaatgcttgatattaaagtcttctatttctaacactattccatctgtggaaaataatactctgacattatcgctaattgacacatcggtgagtgatatgcctataaagtaataatcttctttgggcacatataccagtgtaccaggttctaacaacctatttactggtgctcctgtagcatactttttctttaccttgagaatatccatcgtttgcttggtcaatagcgatatgtgattttttatcaaccactcaaaaaagtaattggagtgttcatatcctctacgggctattgtctcatggccgtgtatgaaatttaagtaacacgactgtggtagatttgttctatagagccgattgccgcaaatagatagaactaccaatatgtctgtacaaatgttaaacattaattgattaacagaaaaaacaatgttcgttctgggaatagaaaccagatcaaaacaaaattcgttagaatatatgccacgtttatacatggaatataaaataactacagtttgaaaaataacagtatcatttaaacatttaacttgcggggttaatctcacaactttactgtttttgaactgttcaaaatatagcatcgatccgtgagaaatacgtttagccgcctttaatagaggaaatcccaccgcctttctggatctcaccaacgacgatagttctgaccagcaactcatttcttcatcatccacctgttttaacatataataggcaggagatagatatccgtcattgcaatattccttctcgtaggcacacaatctaatattgataaaatctccattctcttctctgcatttattatcttgtctcggtggctgattaggctgtggtcttggtttaggccttggtctatcgttgttgaatctattttggtcattaaatctttcatttcttcctggtatatttctatcacctcgtttggttggatttttgtctatattatcgtttgtaacatcggtacgggtattcatttatcacaaaaaaaacttctctaaatgagtctactgctagaaaacctcatcgaagaagataccatattttttgcaggaagtatatctgagtatgatgatttacaaatggttattgccggcgcaaaatccaaatttccaagatctatgctttctatttttaatatagtacctagaacgatgtcaaaatatgagttggagttgattcataacgaaaatatcacaggagcaatgtttaccacaatgtataatataagaaacaatttgggtctaggagatgataaactaactattgaagccattgaaaactatttcttggatcctaacaatgaagttatgcctcttattattaataatacggatatgactgccgtcattcctaaaaaaagtggtaggagaaagaataagaacatggttatcttccgtcaaggatcatcacctatcttgtgcattttcgaaactcgtaaaaagattaatatttataaagaaaatatggaatccgcgtcgactgagtatacacctatcggagacaacaaggctttgatatctaaatatgcgggaattaatgtcctgaatgtgtattctccttccacatccataagattgaatgccatttacggattcaccaataaaaataaactagagaaacttagtactaataaggaactagaatcgtatagttctagccctcttcaagaacccattaggttaaatgattttctgggactattggaatgtgttaaaaagaatattcctctaacagatattccgacaaaggattgattactataaatggagaatgttcctaatgtatactttaatcctgtgtttatagagcccacgtttaaacattctttattaagtgtttataaacacagattaatagttttatttgaagtattcgttgtattcattctaatatatgtattttttagatctgaattaaatatgttcttcatgcctaaacgaaaaatacccgatcctattgatagattacgacgtgctaatctagcgtgtgaagacgataaattaatgatctatggattaccatggatgacaactcaaacatctgcgttatcaataaatagtaaaccgatagtgtataaagattgtgcaaagcttttgcgatcaataaatggatcacaaccagtatctcttaacgatgttcttcgcagatgatgattcattttttaagtatttggctagtcaagatgatgaatcttcattatctgatatattgcaaatcactcaatatctagactttctgttattattattgatccaatcaaaaaataaattagaagctgtgggtcattgttatgaatctctttcagaggaatacagacaattgacaaaattcacagactttcaagattttaaaaaactgtttaacaaggtccctattgttacagatggaagggtcaaacttaataaaggatatttgttcgactttgtgattagtttgatgcgattcaaaaaagaatcctctctagctaccaccgcaatagatcctgttagatacatagatcctcgtcgcaatatcgcattttctaacgtgatggatatattaaagtcgaataaagtgaacaataattaattctttattgtcatcatgaacggcggacatattcagttgataatcggccccatgttttcaggtaaaagtacagaattaattagacgagttagacgttatcaaatagctcaatataaatgcgtgactataaaatattctaacgataatagatacggaacgggactatggacgcatgataagaataattttgaagcattggaagcaactaaactatgtgatgtcttggaatcaattacagatttctccgtgataggtatcgatgaaggacagttctttccagacattgttgaattagatcgataaaaattaattaattacccgggtaccaggcctagatctgtcgagatccggtggtggtgcaaatcaaagaactgctcctcagtggatgttgcctttacttctaggcctgtacggaagtgttacttctgctctaaaagctgctgcagggggggggggggggtgggggggccggttagggccgccatcccctcagagcgtcgggatatcgggtggcggctcgggacggaggacgcgctagtgttcttctgtgtggcagttcagaatgatggatcaagctagatcagcattctctaacttgtttggtggagaaccattgtcatatacccggttcagcctggctcggcaagtagatggcgataacagtcatgtggagatgaaacttgctgtagatgaagaagaaaatgctgacaataacacaaaggccaatgtcacaaaaccaaaaaggtgtagtggaagtatctgctatgggactattgctgtgatcgtctttttcttgattggatttatgattggctacttgggctattgtaaaggggtagaaccaaaaactgagtgtgagagactggcaggaaccgagtctccagtgagggaggagccaggagaggacttccctgcagcacgtcgcttatattgggatgacctgaagagaaagttgtcggagaaactggacagcacagacttcaccagcaccatcaagctgctgaatgaaaattcatatgtccctcgtgaggctggatctcaaaaagatgaaaatcttgcgttgtatgttgaaaatcaatttcgtgaatttaaactcagcaaagtctggcgtgatcaacattttgttaagattcaggtcaaagacagcgctcaaaactcggtgatcatagttgataagaacggtagacttgtttacctggtggagaatcctgggggttatgtggcgtatagtaaggctgcaacagttactggtaaactggtccatgctaattttggtactaaaaaagattttgaggatttatacactcctgtgaatggatctatagtgattgtcagagcagggaaaatcacctttgcagaaaaggttgcaaatgctgaaagcttaaatgcaattggtgtgttgatatacatggaccagactaaatttcccattgttaacgcagaactttcattctttggacatgctcatctggggacaggtgacccttacacacctggattcccttccttcaatcacactcagtttccaccatctcggtcatcaggattgcctaatatacctgtccagacaatctccagagctgctgcagaaaagctgtttgggaatatggaaggagactgtccctctgactggaaaacagactctacatgtaggatggtaacctcagaaagcaagaatgtgaagctcactgtgagcaatgtgctgaaagagataaaaattcttaacatctttggagttattaaaggctttgtagaaccagatcactatgttgtagttggggcccagagagatgcatggggccctggagctgcaaaatccggtgtaggcacagctctcctattgaaacttgcccagatgttctcagatatggtcttaaaagatgggtttcagcccagcagaagcattatctttgccagttggagtgctggagactttggatcggttggtgccactgaatggctagagggatacctttcgtccctgcatttaaaggctttcacttatattaatctggataaagcggttcttggtaccagcaacttcaaggtttctgccagcccactgttgtatacgcttattgagaaaacaatgcaaaatgtgaagcatccggttactgggcaatttctatatcaggacagcaactgggccagcaaagttgagaaactcactttagacaatgctgctttccctttccttgcatattctggaatcccagcagtttctttctgtttttgcgaggacacagattatccttatttgggtaccaccatggacacctataaggaactgattgagaggattcctgagttgaacaaagtggcacgagcagctgcagaggtcgctggtcagttcgtgattaaactaacccatgatgttgaattgaacctggactatgagaggtacaacagccaactgctttcatttgtgagggatctgaaccaatacagagcagacataaaggaaatgggcctgagtttacagtggctgtattctgctcgtggagacttcttccgtgctacttccagactaacaacagatttcgggaatgctgagaaaacagacagatttgtcatgaagaaactcaatgatcgtgtcatgagagtggagtatcacttcctctctccctacgtatctccaaaagagtctcctttccgacatgtcttctggggctccggctctcacacgctgccagctttactggagaacttgaaactgcgtaaacaaaataacggtgcttttaatgaaacgctgttcagaaaccagttggctctagctacttggactattcagggagctgcaaatgccctctctggtgacgtttgggacattgacaatgagttttaaatgtgatacccatagcttccatgagaacagcagggtagtctggtttctagacttgtgctgatcgtgctaaattttcagtagggctacaaaacctgatgttaaaattccatcccatcatcttggtactactagatgtctttaggcagcagcttttaatacagggtagataacctgtacttcaagttaaagtgaataaccacttaaaaaatgtccatgatggaatattcccctatctctagaattttaagtgctttgtaatgggaactgcctctttcctgttgttgttaatgaaaatgtcagaaaccagttatgtgaatgatctctctgaatcctaagggctggtctctgctgaaggttgtaagtggtcgcttactttgagtgatcctccaacttcatttgatgctaaataggagataccaggttgaaagaccttctccaaatgagatctaagcctttccataaggaatgtagctggtttcctcattcctgaaagaaacagttaactttcagaagagatgggcttgttttcttgccaatgaggtctgaaatggaggtccttctgctggataaaatgaggttcaactgttgattgcaggaataaggccttaatatgttaacctcagtgtcatttatgaaaagaggggaccagaagccaaagacttagtatattttcttttcctctgtcccttcccccataagcctccatttagttctttgttatttttgtttcttccaaagcacattgaaagagaaccagtttcaggtgtttagttgcagactcagtttgtcagactttaaagaataatatgctgccaaattttggccaaagtgttaatcttaggggagagctttctgtccttttggcactgagatatttattgtttatttatcagtgacagagttcactataaatggtgtttttttaatagaatataattatcggaagcagtgccttccataattatgacagttatactgtcggttttttttaaataaaagcagcatctgctaataaaacccaacagatactggaagttttgcatttatggtcaacacttaagggttttagaaaacagccgtcagccaaatgtaattgaataaagttgaagctaagatttagagatgaattaaatttaattaggggttgctaagaagcgagcactgaccagataagaatgctggttttcctaaatgcagtgaattgtgaccaagttataaatcaatgtcacttaaaggctgtggtagtactcctgcaaaattttatagctcagtttatccaaggtgtaactctaattcccattttgcaaaatttccagtacctttgtcacaatcctaacacattatcgggagcagtatcttccataatgtataaagaacaaggtagtttttacctaccacagtgtctgtatcggagacagtgatctccatatgttacactaagggtgtaagtaattatcgggaacagtgtttcccataattttcttcatgcaatgacatcttcaaagcttgaagatcgttagtatctaacatgtatcccaactcctataattccctatcttttagttttagttgcagaaacattttgtggtcattaagcattgggtgggtaaattcaaccactgtaaaatgaaattactacaaaatttgaaatttagcttgggtttttgttacctttatggtttctccaggtcctctacttaatgagatagtagcatacatttataatgtttgctattgacaagtcattttaactttatcacattatttgcatgttacctcctataaacttagtgcggacaagttttaatccagaattgaccttttgacttaaagcagagggactttgtatagaaggtttgggggctgtggggaaggagagtcccctgaaggtctgacacgtctgcctacccattcgtggtgatcaattaaatgtaggtatgaataagttcgaagctccgtgagtgaaccatcattataaacgtgatgatcagctgtttgtcatagggcagttggaaacggcctcctagggaaaagttcatagggtctcttcaggttcttagtgtcacttacctagatttacagcctcacttgaatgtgtcactactcacagtctctttaatcttcagttttatctttaatctcctcttttatcttggactgacatttagcgtagctaagtgaaaaggtcatagctgagattcctggttcgggtgttacgcacacgtacttaaatgaaagcatgtggcatgttcatcgtataacacaatatgaatacagggcatgcattttgcagcagtgagtctcttcagaaaacccttttctacagttagggttgagttacttcctatcaagccagtacgtgctaacaggctcaatattcctgaatgaaatatcagactagtgacaagctcctggtcttgagatgtcttctcgttaaggagatgggccttttggaggtaaaggataaaatgaatgagttctgtcatgattcactattctagaacttgcatgacctttactgtgttagctctttgaatgttcttgaaattttagactttctttgtaaacaaatgatatgtccttatcattgtataaaagctgttatgtgcaacagtgtggagattccttgtctgatttaataaaatacttaaacactgaaaaaaaaaaaaaaaaaaaaaaaaaaaaaaaaaaaaaaaaaaaaaaaaaaaaaaaaaaaaaaaaaaaaaaaaaaaaaaaaagtaccttctgaggcggaaagaaccagccggatctcgacttcgagcttatttatattccaaaaaaaaaaaataaaatttcaatttttaagctttcactaattccaaacccacccgctttttatagtaagtttttcacccataaataataaatacaataattaatttctcgtaaaagtagaaaatatattctaatttattgcacggtaaggaagtagatcataactcgagcatgggagatcccgtcgttttacaacgtcgtgactgggaaaaccctggcgttacccaacttaatcgccttgcagcacatccccctttcgccagctggcgtaatagcgaagaggcccgcaccgatcgcccttcccaacagttgcgcagcctgaatggcgaatggcgctttgcctggtttccggcaccagaagcggtgccggaaagctggctggagtgcgatcttcctgaggccgatactgtcgtcgtcccctcaaactggcagatgcacggttacgatgcgcccatctacaccaacgtgacctatcccattacggtcaatccgccgtttgttcccacggagaatccgacgggttgttactcgctcacatttaatgttgatgaaagctggctacaggaaggccagacgcgaattatttttgatggcgttaactcggcgtttcatctgtggtgcaacgggcgctgggtcggttacggccaggacagtcgtttgccgtctgaatttgacctgagcgcatttttacgcgccggagaaaaccgcctcgcggtgatggtgctgcgctggagtgacggcagttatctggaagatcaggatatgtggcggatgagcggcattttccgtgacgtctcgttgctgcataaaccgactacacaaatcagcgatttccatgttgccactcgctttaatgatgatttcagccgcgctgtactggaggctgaagttcagatgtgcggcgagttgcgtgactacctacgggtaacagtttctttatggcagggtgaaacgcaggtcgccagcggcaccgcgcctttcggcggtgaaattatcgatgagcgtggtggttatgccgatcgcgtcacactacgtctgaacgtcgaaaacccgaaactgtggagcgccgaaatcccgaatctctatcgtgcggtggttgaactgcacaccgccgacggcacgctgattgaagcagaagcctgcgatgtcggtttccgcgaggtgcggattgaaaatggtctgctgctgctgaacggcaagccgttgctgattcgaggcgttaaccgtcacgagcatcatcctctgcatggtcaggtcatggatgagcagacgatggtgcaggatatcctgctgatgaagcagaacaactttaacgccgtgcgctgttcgcattatccgaaccatccgctgtggtacacgctgtgcgaccgctacggcctgtatgtggtggatgaagccaatattgaaacccacggcatggtgccaatgaatcgtctgaccgatgatccgcgctggctaccggcgatgagcgaacgcgtaacgcgaatggtgcagcgcgatcgtaatcacccgagtgtgatcatctggtcgctggggaatgaatcaggccacggcgctaatcacgacgcgctgtatcgctggatcaaatctgtcgatccttcccgcccggtgcagtatgaaggcggcggagccgacaccacggccaccgatattatttgcccgatgtacgcgcgcgtggatgaagaccagcccttcccggctgtgccgaaatggtccatcaaaaaatggctttcgctacctggagagacgcgcccgctgatcctttgcgaatacgcccacgcgatgggtaacagtcttggcggtttcgctaaatactggcaggcgtttcgtcagtatccccgtttacagggcggcttcgtctgggactgggtggatcagtcgctgattaaatatgatgaaaacggcaacccgtggtcggcttacggcggtgattttggcgatacgccgaacgatcgccagttctgtatgaacggtctggtctttgccgaccgcacgccgcatccagcgctgacggaagcaaaacaccagcagcagtttttccagttccgtttatccgggcaaaccatcgaagtgaccagcgaatacctgttccgtcatagcgataacgagctcctgcactggatggtggcgctggatggtaagccgctggcaagcggtgaagtgcctctggatgtcgctccacaaggtaaacagttgattgaactgcctgaactaccgcagccggagagcgccgggcaactctggctcacagtacgcgtagtgcaaccgaacgcgaccgcatggtcagaagccgggcacatcagcgcctggcagcagtggcgtctggcggaaaacctcagtgtgacgctccccgccgcgtcccacgccatcccgcatctgaccaccagcgaaatggatttttgcatcgagctgggtaataagcgttggcaatttaaccgccagtcaggctttctttcacagatgtggattggcgataaaaaacaactgctgacgccgctgcgcgatcagttcacccgtgcaccgctggataacgacattggcgtaagtgaagcgacccgcattgaccctaacgcctgggtcgaacgctggaaggcggcgggccattaccaggccgaagcagcgttgttgcagtgcacggcagatacacttgctgatgcggtgctgattacgaccgctcacgcgtggcagcatcaggggaaaaccttatttatcagccggaaaacctaccggattgatggtagtggtcaaatggcgattaccgttgatgttgaagtggcgagcgatacaccgcatccggcgcggattggcctgaactgccagctggcgcaggtagcagagcgggtaaactggctcggattagggccgcaagaaaactatcccgaccgccttactgccgcctgttttgaccgctgggatctgccattgtcagacatgtataccccgtacgtcttcccgagcgaaaacggtctgcgctgcgggacgcgcgaattgaattatggcccacaccagtggcgcggcgacttccagttcaacatcagccgctacagtcaacagcaactgatggaaaccagccatcgccatctgctgcacgcggaagaaggcacatggctgaatatcgacggtttccatatggggattggtggcgacgactcctggagcccgtcagtatcggcggaattccagctgagcgccggtcgctaccattaccagttggtctggtgtcaaaaataataataaccgggcaggggggatccaattctgtgagcgtatggcaaacgaaggaaaaatagttatagtagccgcactcgatgggacatttcaacgtaaaccgtttaataatattttgaatcttattccattatctgaaatggtggtaaaactaactgctgtgtgtatgaaatgctttaaggaggcttccttttctaaacgattgggtgaggaaaccgagatagaaataataggaggtaatgatatgtatcaatcggtgtgtagaaagtgttacatcgactcataatattatattttttatctaaaaaactaaaaataaacattgattaaattttaatataatacttaaaaatggatgttgtgtcgttagataaaccgtttatgtattttgaggaaattgataatgagttagattacgaaccagaaagtgcaaatgaggtcgcaaaaaaactgccgtatcaaggacagttaaaactattactaggagaattattttttcttagtaagttacagcgacacggtatattagatggtgccaccgtagtgtatataggatctgctcccggtacacatatacgttatttgagagatcatttctataatttaggagtgatcatcaaatggatgctaattgacggccgccatcatgatcctattttaaatggattgcgtgatgtgactctagtgactcggttcgttgatgaggaatatctacgatccatcaaaaaacaactgcatccttctaagattattttaatttctgatgtgagatccaaacgaggaggaaatgaacctagtacggcggatttactaagtaattacgctctacaaaatgtcatgattagtattttaaaccccgtggcgtctagtcttaaatggagatgcccgtttccagatcaatggatcaaggacttttatatcccacacggtaataaaatgttacaaccttttgctccttcatattcagctgaaatgagattattaagtatttataccggtgagaacatgagactgactcgagttaccaaattagacgctgtaaattatgaaaaaaagatgtactaccttaataagatcgtccgtaacaaagtagttgttaactttgattatcctaatcaggaatatgactattttcacatgtactttatgctgaggaccgtgtactgcaataaaacatttcctactactaaagcaaaggtactatttctacaacaatctatatttcgtttcttaaatattccaacaacatcaactgaaaaagttagtcatgaaccaatacaacgtaaaatatctagcaaaaattctatgtctaaaaacagaaatagcaagagatccgtacgcggtaataaatagaaacgtactactgagatatactaccgatatagagtataatgatttagttactttaataaccgttagacataaaattgattctatgaaaactgtgtttcaggtatttaacgaatcatccataaattatactccggttgatgatgattatggagaaccaatcattataacatcgtatcttcaaaaaggtcataacaagtttcctgtaaattttctatacatagatgtggtaatatctgacttatttcctagctttgttagactagatactacagaaactaatatagttaatagtgtactacaaacaggcgatggtaaaaagactcttcgtcttcccaaaatgttagagacggaaatagttgtcaagattctctatcgccctaatataccattaaaaattgttagatttttccgcaataacatggtaactggagtagagatagccgatagatctgttatttcagtcgctgattaatcaattagtagagatgagataagaacattataataatcaataatatatcttatatcttatatcttatatcttatatcttgtttagaaaaatgctaatattaaaatagctaacgctagtaatccaatcggaagccatttgatatctataatagggtatctaatttcctgatttaaatagcggacagctatattctcggtagctactcgtttggaatcacaaacattatttacatctaatttactatctgtaatggaaacgtttcccaatgaaatggtacaatccgatacattgcattttgttatatttttttttaaagaggctggtaacaacgcatcgcttcgtttacatggctcgtaccaacaataatagggtaatcttgtatctattcctatccgtactatgcttttatcaggataaatacatttacatcgtatatcgtctttgttagcatcacagaatgcataaatttgttcgtccgtcatgataaaaatttaaagtgtaaatataactattatttttatagttgtaataaaaagggaaatttgattgtatactttcggttctttaaaagaaactgacttgataaaaatggctgtaatctctaaggttacgtatagtctatatgatcaaaaagagattaatgctacagatattatcattagtcatgttaaaaatgacgacgatatcggtaccgttaaagatggtagactaggtgctatggatggggcattatgtaagacttgtgggaaaacggaattggaatgtttcggtcactggggtaaagtaagtatttataaaactcatatagttaagcctgaatttatttcagaaattattcgtttactgaatcatatatgtattcactgcggattattgcgttcacgagaaccgtattccgacgatattaacctaaaagagttatcgggacacgctcttaggagattaaaggataaaatattatccaagaaaaagtcatgttggaacagtgaatgtatgcaaccgtatcaaaaaattactttttcaaagaaaaaggtttgtttcgtcaacaagttggatgatattaacgttcctaattctctcatctatcaaaagttaatttctattcatgaaaagttttggccattattagaaattcatcaatatccagctaacttattttatacagactactttcccatccctccgttgattattagaccggctattagtttttggatagatagtatacccaaagagaccaatgaattaacttacttattaggtatgatcgttaagaattgtaacttgaatgctgatgaacaggttatccagaaggcggtaatagaatacgatgatattaaaattatttctaataacactaccagtatcaatttatcatatattacatccggcaaaaataatatgattagaagttatatcgtcgcccgacgaaaagatcagaccgctagatctgtaattggtcccagtacatctatcaccgttaatgaggtaggaatgcccgcatatattagaaatacacttacagaaaagatatttgttaatgcctttacagtggataaagttaaacaactattagcgtcaaaccaagttaaattttactttaataaacgattaaaccaattaacaagaatacgccaaggaaagtttattaaaaataaaatacatttattgcctggtgattgggtagaagtagctgttcaagaatatacaagtattatttttggaagacagccgtctctacatagatacaacgtcatcgcttcatctatcagagctaccgaaggagatactatcaaaatatctcccggaattgccaactctcaaaatgctgatttcgacggggatgaggaatggatgatattagaacaaaatcctaaagctgtaattgaacaaagtattcttatgtatccgacgacgttactcaaacacgatattcatggagcccccgtttatggatctattcaagatgaaatcgtagcagcgtattcattgtttaggatacaagatctttgtttagatgaagtattgaacatcttggggaaatatggaagagagttcgatcctaaaggtaaatgtaaattcagcggtaaagatatctatacttacttgataggtgaaaagattaattatccgggtctcttaaaggatggtgaaattattgcaaacgacgtagatagtaattttgttgtggctatgaggcatctgtcattggctggactcttatccgatcataagtcgaacgtggaaggtatcaactttattatcaagtcatcttatgtttttaagagatatctatctatttacggttttggggtgacattcaaagatctgagaccaaattcgacgttcactaataaattggaggccatcaacgtagaaaaaatagaacttatcaaagaagcatacgccaaatatctcaacgatgtaagagacgggaaaatagttccattatctaaagctttagaggcggactatgtggaatccatgttatccaacttgacaaatcttaatatccgagagatagaagaacatatgagacaaacgctgatagatgatccagataataacctcctgaaaatggccaaagcgggttataaagtaaatcccacagaactaatgtatattctaggtacgtatggacaacaaaggattgatggtgaaccagcagagactcgagtattgggtagagttttaccttactatcttccagactctaaggatccagaaggaagaggttacattcttaattctttaacaaaaggattaacgggttctcaatattacttttcgatgctggttgccagatctcaatctactgatatcgtctgtgaaacatcacgtaccggaacactggctagaaaaatcattaaaaagatggaggatatggtggtcgacggatacggacaagtagttataggtaatacgctcatcaagtacgccgccaattataccaaaattctaggctcagtatgtaaacctgtagatcttatctatccagatgagtccatgacttggtatttggaaattagtgctctgtggaataaaataaaacagggattcgtttactctcagaaacagaaacttgcaaagaagacattggcgccgtttaatttcctagtattcgtcaaacccaccactgaggataatgctattaaggttaaggatctgtacgatatgattcataacgtcattgatgatgtgagagagaaatacttctttacggtatctaatatagattttatggagtatatattcttgacgcatcttaatccttctagaattagaattacaaaagaaacggctatcactatctttgaaaagttctatgaaaaactcaattatactctaggtggtggaactcctattggaattatttctgcacaggtattgtctgagaagtttacacaacaagccctgtccagttttcacactactgaaaaaagtggtgccgtcaaacaaaaacttggtttcaacgagtttaataacttgactaatttgagtaagaataagaccgaaattatcactctggtatccgatgatatctctaaacttcaatctgttaagattaatttcgaatttgtatgtttgggagaattaaatccaaacatcactcttcgaaaagaaacagataaatatgtagtagatataatagtcaatagattatacatcaagagagcagaaataaccgaattagtcgtcgaatatatgattgaacgatttatctcctttagcgtcattgtaaaggaatggggtatggagacattcattgaggacgaggataatattagatttactgtctacctaaatttcgttgaaccggaagaattgaatcttagtaagtttatgatggttcttccgggggcagccaacaagggaaagattagtaaattcaagattcctatctctgattatacgggatatgacgacttcaatcaaacaaaaaagctcaataagatgactgtagaactcatgaatctaaaagaattgggttctttcgatttggaaaacgtcaacgtgtatcctggagtatggaatacatacgatatcttcggtatcgaggccgctcgtgaatacttgtgcgaagccatgttaaacacctatggagaagggttcgattatctgtatcagccttgtgatcttctcgctagtttactatgtgctagttacgaaccagaatcagtgaataaattcaagttcggcgcagctagtactcttaagagagctacgttcggagacaataaagcattgttaaacgcggctcttcataaaaagtcagaacctattaacgataatagtagctgccacttttttagcaaggtccctaatataggaactggatattacaaatactttatcgacttgggtcttctcatgagaatggaaaggaaactatctgataagatatcttctcaaaagatcaaggaaatggaagaaacagaagacttttaattcttatcaataacatatttttctatgatctgtcttttaaacgatggattttccacaaatgcgcctctcaagtccctcatagaatgatacacgtataaaaaatatagcataggcaatgactccttatttttagacattagatatgccaaaatcatagccccgcttctatttactcccgcagcacaatgaaccaacacgggctcgtttcgttgatcacatttagataaaaaggcggttacgtcgtcaaaatatttactaatatcggtagttgtatcatctaccaacggtatatgaataatattaatattagagttaggtaatgtatatttatccatcgtcaaatttaaaacatatttgaacttaacttcagatgatggtgcatccatagcatttttataatttcccaaatacacattattggttacccttgtcattatagtgggagatttggctttgtgcatatctccagttgaacgtagtagtaagtatttatacaaacttttcttatccatttataacgtacaaatggataaaactactttatcggtaaacgcgtgtaatttagaatacgttagagaaaaggctatagtaggcgtacaagcagccaaaacatcaacacttatattctttgttattatattggcaattagtgcgctattactctggtttcagacgtctgataatccagtctttaatgaattaacgagatatatgcgaattaaaaatacggttaacgattggaaatcattaacggatagcaaaacaaaattagaaagtgatagaggtagacttctagccgctggtaaggatgatatatttgaattcaaatgtgtggatttcggcgcctattttatagctatgcgattggataagaaaacatatctgccgcaagctattaggcgaggtactggagacgcgtggatggttaaaaaggcggcaaaggtcgatccatctgctcaacaattttgtcagtatttgataaaacacaagtctaataatgttattacttgtggtaatgagatgttaaatgaattaggttatagcggttattttatgtcaccgcattggtgttccgattttagtaatatggaatagtgttagataaatgcggtaacgaatgttcctgtaaggaaccataacagcttagatttaacgttaaagatgagcataaacataataaacaaaattacaatcaaacttataacattaatatcaaacaatccaaaaaatgaaatcagtggagtagtaaacgcgtacataactcctggataacgtttagcagctgccgttcctattctagaccaaaaattcggtttcatgttttcgaaacggtattctgcaacaagtcgaggatcgtgttctacatatttggcggcattatccagtatctgcctattgatcttcatttcgttttcgattctggctatttcaaaataaaatcccgatgatagacctccagactttataatttcatctacgatgttcagcgccgtagtaactctaataatataggctgataagctaacatcataccctcctgtatatgtgaatatggcatgatttttgtccattacaagctcggttttaactttattgcctgtaataatttctctcatctgtaggatatctatttttttgtcatgcattgccttcaagacgggacgaagaaacgtaatatcctcaataacgttatcgttttctacaataactacatattctacctttttattttctaactcggtaaaaaaattagaatcccatagggctaaatgtctagcgatatttcttttcgtttcctctgtacacatagtgttacaaaaccctgaaaagaagtgagtatacttgtcatcatttctaatgtttcctccagtccactgtataaacgcataatccttgtaatgatctggatcatccttgactaccacaacatttcttttttctggcataacttcgttgtcctttacatcatcgaacttctgatcattaatatgctcatgaacattaggaaatgtttctgatggaggtctatcaataactggcacaacaataacaggagttttcaccgccgccatttagttattgaaattaatcatatacaactctttaatacgagttatattttcgtctatccattgtttcacattgacatatttcgacaaaaagatataaaatgcgtattccaatgcttctctgtttaatgaattactaaaatatacaaacacgtcactgtctggcaataaatgatatcttagaatattgtaacaatttattttgtattgcacatgttcgtgatctatgagttcttcttcgaatggcataggatctccgaatctgaaaacgtataaataggagttagaataataatatttgagagtattggtaatatataaactctttagcggtataattagtttttttctctcaatttctatttttagatgtgatggaaaaatgactaattttgtagcattagtatcatgaactctaatcaaaatcttaatatcttcgtcacacgttagctctttgaagtttttaagagatgcatcagttggttctacagatggagtaggtgcaacaattttttgttctacacatgtatgtactggagccattgttttaactataatggtgcttgtatcgaaaaactttaatgcagatagcggaagctcttcgccgcgactttctacgtcgtaattgggttctaacgccgatctctgaatggatactagttttctaagttctaatgtgattctctgaaaatgtaaatccaattcctccggcattatagatgtgtatacatcggtaaataaaactatagtatccaacgatcccttctcgcaaattctagtcttaaccaaaaaatcgtatataaccacggagatggcgtatttaagagtggattcttctaccgttttgttcttggatgtcatataggaaactataaagtccgcactactgttaagaatgattactaacgcaactatatagtttaaattaagcattttggaaacataaaataactctgtagacgatacttgactttcgaataagtttgcagacaaacgaagaaagaacagacctctcttaatttcagaagaaaactttttttcgtattcctgacgtctagagtttatatcaataagaaagttaagaattagtcggttaatgttgtatttcattacccaagtttgagatttcataatattatcaaaagacatgataatattaaagataaagcgctgactatgaacgaaatagctatatggttcgctcaagaatatagtcttgttaaacgtggaaacgataactgtatttttaatcacgtcagcggcatctaaattaaatataggtatatttattccacacactctacaatatgccacaccatcttcataataaataaattcgttagcaaaattattaattttagtgaaatagttagcgtcaactttcatagcttccttcaatctaatttgatgctcacacggtgcgaattccactctaacatcccttttccatgcctcaggttcatcgatctctataatatctagttttttgcgtttcacaaacacaggctcgtctctcgcgatgagatctgtatagtaactatgtaaatgataactagatagaaagatgtagctatatagatgacgatcctttaagagaggtataataactttaccccaatcagatagactgttgttatggtcttcggaaaaagaatttttataaatttttccagtattttccaaatatacgtacttaacatctaaaaaatccttaatgataataggaatggataatccgtctattttataaagaaatacatatcgcacattatacttttttttggaaatgggaataccgatgtgtctacataaatatgcaaagtctaaatattttttagagaatcttagttggtccaaattcttttccaagtacggtaatagatttttcatattgaacggtatcttcttaatctctggttctagttccgcattaaatgatgaaactaagtcactatttttataactaacgattacatcacctctaacatcatcatttaccagaatactgatcttcttttgtcgtaaatacatgtctaatgtgttaaaaaaaagatcatacaagttatacgtcatttcatctgtggtattcttgtcattgaaggataaactcgtactaatctcttctttaacagcctgttcaaatttatatcctatatacgaaaaaatagcaaccagtgtttgatcatccgcgtcaatattctgttctatcgtagtgtataacaatcgtatatcttcttctgtgatagtcgatacgttataaaggttgataacgaaaatatttttatttcgtgaaataaagtcatcgtaggattttggacttatattcgcgtctagtagatatgcttttatttttggaatgatctcaattagaatagtctctttagagtccatttaaagttacaaacaactaggaaattggtttatgatgtataatttttttagtttttatagattctttattctatacttaaaaaatgaaaataaatacaaaggttcttgagggttgtgttaaattgaaagcgagaaataatcataaattatttcattatcgcgatatccgttaagtttgtatcgtaatggcgtggtcaattacgaataaagcggatactagtagcttcacaaagatggctgaaatcagagctcatctaaaaaatagcgctgaaaataaagataaaaacgaggatattttcccggaagatgtaataattccatctactaagcccaaaaccaaacgagccactactcctcgtaaaccagcggctactaaaagatcaaccaaaaaggaggaagtggaagaagaagtagttatagaggaatatcatcaaacaactgaaaaaaattctccatctcctggagtcagcgacattgtagaaagcgtggccgctgtagagctcgatgatagcgacggggatgatgaacctatggtacaagttgaagctggtaaagtaaatcatagtgctagaagcgatctctctgacctaaaggtggctaccgacaatatcgttaaagatcttaagaaaattattactagaatctctgcagtatcgacggttctagaggatgttcaagcagctggtatctctagacaatttacttctatgactaaagctattacaacactatctgatctagtcaccgagggaaaatctaaagttgttcgtaaaaaagttaaaacttgtaagaagtaaatgcgtgcacttttttataaagatggtaaactctttaccgataataattttttaaatcctgtatcagacgataatccagcgtatgaggttttgcaacatgttaaaattcctactcatttaacagatgtagtagtatatgaacaaacgtgggaggaggcgttaactagattaatttttgtgggaagtgattcaaaaggacgtagacaatacttttacggaaaaatgcatgtacagaatcgcaacgctaaaagagatcgtatttttgttagagtatataacgttatgaaacgaattaattgttttataaacaaaaatataaagaaatcgtccacagattccaattatcagttggcggtttttatgttaatggaaactatgttttttattagatttggtaaaatgaaatatcttaaggagaatgaaacagtagggttattaacactaaaaaataaacacatagaaataagtcccgatgaaatagttatcaagtttgtaggaaaggacaaagtttcacatgaatttgttgttcataagtctaatagactatataaaccgctattgaaactgacggatgattctagtcccgaagaatttctgttcaacaaactaagtgaacgaaaggtatacgaatgtatcaaacagtttggtattagaatcaaggatctccgaacgtatggagtcaattatacgtttttatataatttttggacaaatgtaaagtccatatctcctcttccgtcaccaaaaaagttaatagcattaactatcaaacaaactgctgaagtggtaggtcatactccatcaatttcaaaaagagcttatatggcaacgactattttagaaatggtaaaggataaaaattttttagatgtagtatctaaaactacgttcgatgaattcctatctatagtcgtagatcacgttaaatcatctacggatggatgatatagatctttacacaaataattacaagaccgataaatggaaatggataagcgtatgaaatctctcgcaatgacagctttcttcggagagctaagcacattagatattatggcattgataatgtctatatttaaacgccatccaaacaataccattttttcagtggataaggatggtcagtttatgattgatttcgaatacgataattataaggcttctcaatatttggatctgaccctcactccgatatctggagatgaatgcaagactcacgcatcgagtatagccgaacaattggcgtgtgcggatattattaaagaggatattagcgaatatatcaaaactactccccgtcttaaacgatttataaaaaaataccgcaatagatcagatactcgtatcagtcgagatacagaaaagcttaaaatagctctagctaaaggcatagattacgaatatataaaagacgcttgttaataagtaaatgaaaaaaaactagtcgtttataataaaacacgatatggatgccaacgtagtatcattttctactattgcgacgtatatagacgctttagcgaagaatgcttcggaattagaacagaggtctaccgcatacgaaataaataatgaattggaactagtatttattaagccgccattgattactttgacaaatgtagtgaatatctctacgattcaggaatcgtttattcgatttaccgttactaataaggaaggtgttaaaattagaactaagattccattatctaaggtacatggtctagatgtaaaaaatgtacagttagtagatgctatagataacatagtttgggaaaagaaatcattagtgacggaaaatcgtcttcacaaagaatgcttgttgagactatcgacagaggaacgtcatatatttttggattacaagaaatatggatcctctatccgactagaattagtcaatcttattcaagcaaaaacaaaaaactttacgatagactttaagctaaaatattttctaggatccggtgcccagtctaaaagttctttgttgcacgctattaatcatccaaagtcaaggcctaatacatctctggaaatagaattcacacctagagacaatgaaacagttccatatgatgaactaataaaggaattgacgactctctcgcgtcatatatttatggcttctccagagaatgtaattctttctccgcctattaacgcgcctataaaaacctttatgttgcctaaacaagatatagtaggtttggatctggaaaatctatatgccgtaactaagactgacggcattcctataactatcagagttacatcaaacgggttgtattgttattttacacatcttggttatattattagatatcctgttaagagaataatagattccgaagtagtagtctttggtgaggcagttaaggataagaactggaccgtatatctcattaagctaatagagcctgtgaatgcaatcaatgatagactagaagaaagtaagtatgttgaatctaaactagtggatatttgtgatcggatagtattcaagtcaaagaaatacgaaggtccgtttactacaactagtgaagtcgtcgatatgttatctacatatttaccaaagcaaccagaaggtgttattctgttctattcaaagggacctaaatctaacattgattttaaaattaaaaaggaaaatactatagaccaaactgcaaatgtagtatttaggtacatgtccagtgaaccaattatctttggagaatcgtctatctttgtagagtataagaaatttagcaacgataaaggctttcctaaagaatatggttctggtaagattgtgttatataacggcgttaattatctaaataatatctattgtttggaatatattaatacacataatgaagtgggtattaagtccgtggttgtacctattaagtttatagcagaattcttagttaatggagaaatacttaaacctagaattgataaaaccatgaaatatattaactcagaagattattatggaaatcaacataatatcatagtcgaacatttaagagatcaaagcatcaaaataggagatatctttaacgaggataaactatcggatgtgggacatcaatacgccaataatgataaatttagattaaatccagaagttagttattttacgaataaacgaactagaggaccgttgggaattttatcaaactacgtcaagactcttcttatttctatgtattgttccaaaacatttttagacgattccaacaaacgaaaggtattggcgattgattttggaaacggtgctgacctggaaaaatacttttatggagagattgcgttattggtagcgacggatccggatgctgatgctatagctagaggaaatgaaagatacaacaaattaaactctggaattaaaaccaagtactacaaatttgactacattcaggaaactattcgatccgatacatttgtctctagtgtcagagaagtattctattttggaaagtttaatatcatcgactggcagtttgctatccattattcttttcatccgagacattatgctaccgtcatgaataacttatccgaactaactgcttctggaggcaaggtattaatcactaccatggacggagacaaattatcaaaattaacagataaaaagacttttataattcataagaatttacctagtagcgaaaactatatgtctgtagaaaaaatagctgatgatagaatagtggtatataatccatcaacaatgtctactccaatgactgaatacattatcaaaaagaacgatatagtcagagtgtttaacgaatacggatttgttcttgtagataacgttgatttcgctacaattatagaacgaagtaaaaagtttattaatggcgcatctacaatggaagatagaccgtctacaaaaaactttttcgaactaaatagaggagccattaaatgtgaaggtttagatgtcgaagacttacttagttactatgttgtttatgtcttttctaagcggtaaataataatatggtatgggttctgatctcccagttctaaatgcattaaataattccaatagagcgatttttgttcctataggaccttccaactgtggatactctgtattgttaatagatatattaatacttttgtcgggtaacagaggttctacgtcttctaaaaataaaagttttataacatctggcctgttcataaataaaaacttggcgattctatatatactcttattatcaaatctagccattgtcttatagatgtgagctactgtaggtgtaccatttgattttctttctaatactatatatttctctcgaagaagttcttgcacatcatctgggaataaaatactactgttgagtaaatcagttattttttttatatcgatattgatggacatttttatagttaaggataataagtatcccaaagtcgataacgacgataacgaagtatttatacttttaggaaatcacaatgactttatcagattaaaattaacaaaattaaaggagcatgtatttttttctgaatatattgtgactccagatacatatggatctttatgcgtcgaattaaatgggtctagttttcagcacggcggtagatatatagaggtggaggaatttatagatgctggaagacaagttagatggtgttctacatccaatcatatatctaaagatatacccgaagatatgcacactgataaatttgtcatttatgatatttatacgtttgattcgttcaagaataaacgattggtattcgtacaggtacctccgtcgttaggagatgatagtcatttgactaatccgttattgtcaccgtattatcgtaattcagtagccagacaaatggtcaatgatatgatttttaatcaagattcatttttaaaatatttattagaacatctgattagaagccactatagagtttctaaacatataacaatagttagatacaaggataccgaagaattaaatctaacgagaatatgttataatagagataagtttaaggcgtttgtattcgcttggtttaacggcgtttcggaaaatgaaaaggtactagatacgtataaaaaggtatctaatttgatataatgaattcagtgactgtatcacacgcgccatatactattacttatcacgatgattgggaaccagtaatgagtcaattggtagagttttataacgaagtagccagttggctgctacgagacgagacgtcgcctattcctgataagttctttatacagttgaaacaaccgcttagaaataaacgagtatgtgtgtgtggtatagatccgtatccgaaagatggaactggtgtaccgttcgaatcaccaaattttacaaaaaaatcaattaaggagatagcttcatctatatctagattaaccggagtaattgattataaaggttataaccttaatataatagacggggttataccctggaattattacttaagttgtaaattaggagaaacaaaaagtcacgcgatttactgggataagatttccaagttactgctgcagcatataactaaacacgttagtgttctttattgtttgggtaaaacagatttctcgaatatacgggccaagttagaatccccggtaactaccatagtcggatatcatccagcggctagagaccgccaattcgagaaagatagatcatttgaaattatcaacgttttactggaattagacaacaaggcacctataaattgggctcaagggtttatttattaatgctttagtgaaattttaacttgtgttctaaatggatgcggctattagaggtaatgatgttatctttgttcttaagactataggtgtcccgtcagcgtgcagacaaaatgaagatccaagatttgtagaagcatttaaatgcgacgagttagaaagatatattgagaataatccagaatgtacactattcgaaagtcttagggatgaggaagcatactctatagtcagaattttcatggatgtagatttagacgcgtgtctagacgaaatagattatttaacggccattcaagattttattatcgaggtgtcaaactgtgtagctagattcgcgtttacagaatgcggcgccattcatgaaaatgtaataaaatccatgagatctaatttttcattgactaagtctacaaatagagataaaacaagttttcatattatctttttagatacgtataccactatggatacattgatagctatgaaacgaacactattagaattaagtagatcatctgaaaatccactaaccagatcgatagacactgccgtatataggagaaaaacaactcttcgggttgtaggtactaggaaaaatccaaattgcgacactattcatgtaatgcaaccaccgcatgataatatagaagattacctattcacttacgtggatatgaacaacaatagttattacttttctctacaacaacgattggaggatttagttcctgataagttatgggaaccagggtttatttcattcgaagacgctataaaaagagtttcaaaaatattcattaattctataataaactttaatgatctcgatgaaaataattttacaacggtaccactggtcatagattacgtaacaccttgtgcattatgtaaaaaacgatcgcataaacatccgcatcaactatcgttggaaaatggtgctattagaatttacaaaactggtaatccacatagttgtaaagttaaaattgttccgttggatggtaataaactgtttaatattgcacaaagaattttagacactaactctgttttattaaccgaacgaggagaccatatagtttggattaataattcatggaaatttaacagcgaagaacccttgataacaaaactaattttgtcaataagacatcaactacctaaggaatattcaagcgaattactctgtccaagaaaacgaaagactgtagaagctaacatacgagacatgttagtagattcagtggagaccgatacctatccggataaacttccgtttaaaaatggtgtattggacctggtagacggaatgttttactctggagatgatgctaaaaaatatacgtgtactgtatcaaccggatttaaatttgacgatacaaagttcgtcgaagacagtccagaaatggaagagttaatgaatatcattaacgatatccaaccattaacggatgaaaataagaaaaatagagagctatatgaaaaaacattatctagttgtttatgcggtgctaccaaaggatgtttaacattcttttttggagaaactgcaactggaaagtcgacaaccaaacgtttgttaaagtctgctatcggtgacctgtttgttgagacgggtcaaacaattttaacagatgtattggataaaggacctaatccatttatcgctaacatgcatttgaaaagatctgtattctgtagcgaactacctgattttgcctgtagtggatcaaagaaaattagatctgacaatattaaaaagttgacagaaccttgtgtcattggaagaccgtgtttctccaataaaattaataatagaaaccatgcgacaatcattatcgatactaattacaaacctgtttttgataggatagataacgcattaatgagaagaattgccgtcgtgcgattcagaacacacttttctcaaccttctggtagagaggctgctgaaaataatgacgcgtacgataaagtcaaactattagacgaggggttagatggtaaaatacaaaataatatatatagatttgcatttctatacttgttggtgaaatggtacaaaaaatatcatgttcctattatgaaactatatcctacacccgaagagattcctgactttgcattctatctcaaaataggtactctgttggtatctagctctgtaaagcatattccattaatgacggacctctccaaaaagggatatatattgtacgataatgtggtcactcttccgttgactactttccaacagaaaatatccaagtattttaattctagactatttggacacgatatagagagcttcatcaatagacataagaaatttgccaatgttagtgatgaatatctgcaatatatattcatagaggatatttcatctccgtaaatatatgctcatatatttatagaagatatcacatatctaaatgaataccggaatcatagatttatttgataatcatgttgatagtataccaactatattacctcatcagttagctactctagattatctagttagaactatcatagatgagaacagaagcgtgttattgttccatattatgggatcaggtaaaacaataatcgctttgttgttcgccttggtagcttccagatttaaaaaggtttacattctagtgccgaacatcaacatcttaaaaattttcaattataatatgggtgtagctatgaacttgtttaatgacgaattcatagctgagaatatctttattcattccacaacaagtttttattctcttaattataacgataacgtcattaattataacggattatctcgctacaataactctatttttatcgttgatgaggcacataatatctttgggaataatactggagaacttatgaccgtgataaaaaataaaaacaagattccttttttactattgtctggatctcccattactaacacacctaatactctgggtcatattatagatttaatgtccgaagagacgatagattttggtgaaattattagtcgtggtaagaaagtaattcagacacttcttaacgaacgcggtgtgaatgtacttaaggatttgcttaaaggaagaatatcatattacgaaatgcctgataaagatctaccaacgataagatatcacggacgtaagtttctagatactagagtagtatattgtcacatgtctaaacttcaagagagagattatatgattactagacgacagctatgttatcatgaaatgtttgataaaaatatgtataacgtgtcaatggcagtattgggacaacttaatctgatgaataatttagatactttatttcaggaacaggataaggaattgtacccaaatctgaaaataaataatggcgtgttatacggagaagaattggtaacgttaaacattagttccaaatttaaatactttattaatcggatacagacactcaacggaaaacattttatatacttttctaattctacatatggcggattggtaattaaatatatcatgctcagtaatggatattctgaatataatggttctcagggaactaatccacatatgataaacggcaaaccaaaaacatttgctatcgttactagtaaaatgaaatcgtctttagaggatctattagatgtgtataattctcctgaaaacgatgatggtagtcaattgatgtttttgttttcatcaaacattatgtccgaatcctatactctaaaagaggtaaggcatatttggtttatgactatcccagatactttttctcaatacaaccaaattcttggacgatctattagaaaattctcttacgccgatatttctgaaccagttaatgtatatcttttagccgccgtatattccgatttcaatgacgaagtgacgtcattaaacgattacacacaggatgaattaattaatgttttaccatttgacatcaaaaagctgttgtatctaaaatttaagacgaaagaaacgaatagaatatactctattcttcaagagatgtctgaaacgtattctcttccaccacatccatcaattgtaaaagttttattgggagaattggtcagacaatttttttataataattctcgtattaagtataacgataccaagttacttaaaatggttacatcagttataaaaaataaagaagacgctaggaattacatagatgatattgtaaacggtcacttctttgtatcgaataaagtatttgataaatctcttttatacaaatacgaaaacgatattattacagtaccgtttagactttcctacgaaccatttgtttggggagttaactttcgtaaagaatataacgtggtatcttctccataaaactgatgagatatataaagaaataaatgtcgagctttgttaccaatggatacctttccgttacattggaaccacacgagctgacgttagacataaaaactaatattaggaatgccgtatataagacgtatctccatagagaaattagtggtaaaatggccaagaaaatagaaattcgtgaagacgtggaattacctctcggcgaaatagttaataattctgtagttataaacgttccgtgtgtaataacctacgcgtattatcacgttggggatatagtcagaggaacattaaacatcgaagatgaatcaaatgtaactattcaatgtggagatttaatctgtaaactaagtagagattcgggtactgtatcatttagcgattcaaagtactgcttttttcgaaatggtaatgcgtatgacaatggcagcgaagtcactgccgttctaatggaggctcaacaaggtatcgaatctagttttgtttttctcgcgaatatcgtcgactcataaaaaagagaatagcggtaagtataaacacgaatactatggcaataattgcgaatgttttattctcttcgatatatttttgataatatgaaaaacatgtctctctcaaatcggacaaccatctcataaaatagttctcgcgcgctggagaggtagttgccgctcgtataatctctccagaataatatacttgcgtgtcgtcgttcaatttatacggatttctatagttctctgttatataatgcggtttgccctcatgattagacgacgacaatagtgttctaaatttagatagttgatcagaatgaatgtttattggcgttggaaaaattatccatacagcgtctgcagagtggttgatagttgttcctagatatgtaaaataatccaacttactaggcagcaaattgtctagataaaatactgaatcaaacggtgcagacgtattggcggatctaatggaatccaattgattaactatcttttgaaaatatacatttttatgatccaatacttgtaagaatatagaaataatgataagtccatcatcgtgtttttttgcctcttcataagaactatattttttcttattccaatgaacaagattaatctctccagagtatttgtacacatctatcaagtgattggatccataatcgtcttcctttccccaatatatatgtagtgatgataacacatattcattggggagaaaccctccacttatatatcctcctttaaaattaatccttactagttttccagtgttctggatagtggttggtttcgactcattataatgtatgtctaacggcttcaatcgcgcgttagaaattgcttttttagtttctatattaataggagatagttgttgcggcatagtaaaaatgaaatgataactgtttaaaaatagctcttagtatgggaattacaatggatgaggaagtgatatttgaaactcctagagaattaatatctattaaacgaataaaagatattccaagatcaaaagacacgcatgtgtttgctgcgtgtataacaagtgacggatatccgttaataggagctagaagaacttcattcgcgttccaggcgatattatctcaacaaaattcagattctatctttagagtatccactaaactattacggtttatgtactacaatgaactaagagaaatctttagacggttgagaaaaggttctatcaacaatatcgatcctcactttgaagagttaatattattgggtggtaaactagataaaaaggaatctattaaagattgtttaagaagagaattaaaagaggaaagtgatgaacgtataacagtaaaagaatttggaaatgtaattctaaaacttacaacacgggataaattatttaataaagtatatataagttattgcatggcgtgttttattaatcaatcgttggaggatttatcgcatactagtatttacaatgtagaaattagaaagattaaatcattaaatgattgtattaacgacgataaatacgaatatctgtcttatatttataatatgctagttaatagtaaatgaacttttacagatctagtataattagtcagattattaagtataatagacgactagctaagtctattatttgcgaggatgactctcaaattattacactcacggcattcgttaaccaatgcctatggtgtcataaacgagtatccgtgtccgctattttattaactactgataacaaaatattagtatgtaacagacgagatagttttctctattctgaaataattagaactagaaacatgtttagaaagaaacgattatttctgaattattccaattatttgaacaaacaggaaagaagtatactatcgtcatttttttctctagatccagctactactgataatgatagaatagacgctatttatccgggtggcatacccaaaaggggtgagaatgttccagagtgtttatccagggaaattaaagaagaagttaatatagacaattcttttgtattcatagacactcggttttttattcatggcatcatagaagataccattattaataaattttttgaggtaatcttctttgtcggaagaatatctctaacgagtgatcaaatcattgatacatttaaaagtaatcatgaaatcaaggatctaatatttttagatccgaattcaggtaatggactccaatacgaaattgcaaaatatgctctagatactgcaaaacttaaatgttacggccatagaggatgttattatgaatcattaaaaaaattaactgaggatgattgattaaaaaatataaattaatttaccatcgtgtatttttataacgggattgtccggcatatcatgtagatagttaccgtctacatcgtatactcgaccatctacgcctttaaatcctctatttattgacattaatctattagaattggaataccaaatattagtaccctcaattagtttattggtaatattttttttagacgatagatcgatggctcttgaaaccaaggttttccaaccggactcattgtcgatcggtgagaagtctttttcattagcatgaatccattctaatgatgtatgtttaaacactctaaacaattggacaaattcttttgatttgctttgaatgatttcaaataggtcttcgtctacagtaggcataccattagataatctagccattataaagtgcacgtttacatatctacgttctggaggagtaagaacgtgactattgagacgaatggctcttcctactatctgacgaagagacgcctcgttccatgtcatatctaaaatgaagatatcattaattgagaaaaaactaataccctcgcctccactagaagagaatacgcatgttttaatgcattctccgttagtgtttgattcttggttaaactcagccaccgccttgattctagtatcttttgttctagatgagaactctatattagagataccaaagactttgaaatatagtaataagatttctattcctgactgattaacaaatggttcaaagactagacatttaccatgggatgctaatattcccaaacatacatctataaatttgacgcttttctcttttaattcagtaaatagagagatatcagccgcactagcatcccctttcaatagttctccctttttaaaggtatctaatgcggatttagaaaactctctatctcttaatgaatttttaaaatcattatatagtgttgctatctcttgcgcgtattcgcccggatcacgattttgtctttcaggaaagctatcgaacgtaaacgtagtagccatacgtctcagaattctaaatgatgatatacctgtttttatttcagcgagtttagccttttgataaatttcttcttgctttttcgacatattaacgtatcgcattaatactgttttcttagcgaatgatgcagacccttctacgtcatcaaaaatagaaaactcgttattaactatatacgaacatagtcctcctagtttggagactaattctttttcatcgactagacgtttattctcaaatagcgattggtgttgtaaggatcctggtcgtagtaagttaaccaacatggtgaattcttgcacactattgacgataggtgtagccgataaacaaatcatcttatggttttttaacgcaatggtcttagataaaaaattatatactgaacgagtaggacggatcttaccatcttctttgattaatgatttagaaatgaagttatgacattcatcaataatgacgcatattctactcttggaattaatagttttgatattagtaaaaaatttatttctaaaattttgatcatcgtaattaataaaaatacaatccttcgttatctctggagcgtatctgagtatagtgttcatccaaggatcttctatcaaagcctttttcaccaataagataatagcccaattcgtataaatatccttaagatgtttgagaatatatacagtagtcattgttttaccgacacccgtttcatggaacaataaaagagaatgcatactgtctaatcctaagaaaactcttgctacaaaatgttgataatccttgaggcgtactacgtccgaccccatcatttcaacgggcatattagtagttctgcgtaaggcataatcgatataggccgcgtgtgatttactcatttatgagtgataagtaataactatgttttaaaaatcacagcagtagtttaactagtcttctctgatgtttgttttcgatactttttgaatcagaagtcatactagaataaagcaacgagtgaacgtaatagagagcttcgtatactctattcgaaaactctaagaacttattaatgaattccgtatccactggattgtttaaaatactaaattgaacactgttcacatccttccaagaagaagacttagtgacggacttaacatgagacataaataaatccaaattttttttacaaacatcactagccaccataatggcgctatctttcaaccagctatcgcttacgcattttagcagtctaacatttttaaagagactacaatatattctcatagtatcgattacacctctaccgaataaagttggaagtttaataatacaatatttttcgtttacaaaatcaaataatggtcgaaacacgtcgaaggttaacatcttataatcgctaatgtatagattgttttcagtgagatgattattagatttaatagcatctcgttcacgtttgaacagtttattgcgtgcgctgaggtcggcaactacggcgtccgctttagtactcctcccataatactttacgctattaatctttaaaatttcatagactttatctagatcgctttctggtaacatgatatcatgtgtaaaaagttttaacatgtcggtcggcattctatttagatcattaactctagaaatctgaagaaagtaattagctccgtattccagactaggtaatgggcttttacctagagacagattaagttctggcaatgtttcataaaatggaagaaggacatgcgttccctcccggatattttttacaatttcatccatttacaactctatagtttgttttcattattattagttattatctcccataatcttggtaatacttaccccttgatcgtaagataccttatacaggtcattacatacaactaccaattgtttttgtacataatagattggatggttgacatccatggtggaataaactactcgaacagatagtttatctttccccctagatacattagccgtaatagttgtcggcctaaagaatatctttggtgtaaagttaaaagttagggttcttgttccattattgctttttgtcagtagttcattataaattctcgagatgggtccgttctctgaatatagaacatcatttccaaatctaacttctagtctagaaataatatcggtcttattcttaaaatctattcccttgatgaagggatcgttaatgaacaaatccttggcctttgattcggctgatctattatctccgttatagacgttacgttgactagtccaaagacttacaggaatagatgtatcgatgatgttgatactatgtgatatgtgagcaaagattgttctcttagtggcatcactatatgttccagtaatggcggaaaactttttagaaatgttatatataaaagaattttttcgtgttccaaacattagcagattagtatgaagataaacactcatattatcaggaacattatcaatttttacatacacatcagcatcttgaatagaaacgataccatcttctggaacctctacgatctcggcagactccggataaccagtcggtgggccatcgctaacaataactagatcatccaacaatctactcacatatgcatctatataatctttttcatcttgtgagtaccctggatacgaaataaatttattatccgtatttccataataaggtttagtataaacagagagagatgttgccgcatgaacttcagttacagtcgccgttggttggtttatttgacctattactctcctaggtttctctataaacgatggtttaatttgtacattcttaaccatatatccaataaagctcaattcaggaacataaacaaattctttgttgaacgtttcaaagtcgaacgaagagtcacgaataacgatatcggatactggattgaaggttaccgttacggtaatttttgaatcggatagtttaagactgctgaatgtatcttccacatcaaacggagttttaatataaacgtatactgtagatggttctttaatagtgtcattaggagttaggccaatagaaatatcattaagttcactagaatatccagagtgtttcaaagcaattgtattattgatacaattattatataattcttcgccctcaatttcccaaataacaccgttacacgaagagatagatacgtgattaatacatttatatccaacatatggtacgtaactgaatcttcccatacctttaacttctggaagttccaaactcagaaccaaatgattaagcgcagtaatatactgatccctaatttcgaagctagcgatagcctgattgtctggaccatcgtttgtcataactccggatagagaaatatattgcggcatatacaaagttggaatttgactatcgactgcgaagacattagaccgtttaatagagtcatccccaccgatcaaagaattaatgatagtattattcattttctatttaaaatggaaaaagcttacaataaactccgtagagaaatatctataatttgtgagttttccttaaagtaacagcttccgtaaacgccgtctttatctcttagtaggtttattgtatttatgaccttttccttatcttcatagaatactaaaggcaacaaagaaatttttggttcttctctaagagctacgtgagacttaaccatagaagccaacgaatccctacatattttagaacagaaataccctacttcaccacccttgtatgtctcaatactaataggtctaaaaaccaaatcttgattacaaaaccaacacttatcaattacactatttgtcttaatagacacatctgccatagatttataatactttggtagtatacaagcgagtgcttcttctttagcgggcttaaagactgctttaggtgctgaaataaccacatctggaaggcttactcgcttagccatttaattacggaactatttttttatacttctaatgagcaagtagaaaacctctcatctacaaaaacgtactcgtgtccataatcctctaccatagttacacgttttttagatctcatatgtgctaaaaagttttcccatactaattggttactattatttttcgtataatttttaacagtttgaggttttagatttttagttacagaagtgatatcgaatattttatccaaaaagaatgaataattaattgtcttagaaggagtgttttcttggcaaaagaataccaagtgcttaaatatttctactacttcattaatcttttctgtactcagattcagtttctcatcttttacttgattgattatttcaaagactaacttataatcctttttatttattctctcgttagccttaagaaaactagatacaaaatttgcatctacatcatccgtggatatttgatttttttccatgatatccaagagttccgagataatttctccagaacattgatgagacaataatctccgcaatacatttctcaaatgaataagtttattagacacgtggaagtttgactttttttgtacctttgtacatttttgaaataccgactcgcaaaaaatacaatattcatatccttgttcagatactataccgttatgtctacaaccgctacataatcgtagattcatgttaacactctacgtatctcgtcgtccaatattttatataaaaacattttatttctagacgttgccagaaaatcctgtaatatttttagttttttgggctgtgaataaagtatcgccctaatattgttaccgtcttccgccaatatagtagttaaattatccgcacatgcagaagaacaccgcttaggcggattcagtacaatgttatatttttcgtaccaactcatttaaatatcataatctaaaatagttctgtaatatgtctagcgctaatatattgatcataatcctgtgcataaattaagatacaacaatgtctcgaaatcatcgacatggcttcttccatagttagaagatcgtcgtcaaagttagcaacgtgattcatcaacatttgctgttttgaggcagcaaatactgaaccgtcgccattcaaccattcataaaaaccatcgtctgaatccattgataatttcttgtactggtttttgagagctcgcatcaatctagcatttctagctcccggattgaaaacagaaagaggatcgtacatccagggtccattttctgtaaatagaatcgtataatgtcccttcaagaagatatcagacgatccacaatcaaagaattggtctccgagtttgtaacaaactgcggactttaacctatacatgataccgtttagcataatttctggtgatacgtcaatcggagtatcatctattagagatctaaagccggtgtaacattctccaccaaacatattcttattctgacgtcgttctacataaaacatcattgctccattaacgataacaggggaatgaacagcactacccatcacattagttcccaatggatcaatgtgtgtaactccagaacatcttccatagcctatgttaggaggagcgaacaccactcttccactattgccatcgaatgccatagaataaatatccttggaattgatagaaatcggactgtcggatgttgtgatcatcttcataggattaacaactatgtatggtgccgcctgaagtttcatatcgtaactgatgccgtttataggtctagccacagaaaccaacgtaggtctaaatccaactatagacaaaatagaagccaatatctgttcctcatctgtcataacttgagagcatccagtatgaataatcttcattagatggggatctaccgcatcatcatcgttacaataaaaaattcccattctaatgttcataattgcttttctaatcatggtatgcatgtttgctctctgaatctctgtggaaattagatctgatacacctgtaatcactatcggattatcctccgtaagacgattaaccaacaacatataattataagactttacttttctaaattcataaagttgctggattaggctataggtgtctccatgtacatacgcgttctcgagcgcaggaagtttaataccgaatagtgccatcagaataggatgaatatagtaattagtttctggttttctataaataaaagacaaatcttgtgaactagacatatcggtaaaatgcatggattggaatcgtgtagtcgacagaagaatatgatgattagatggagagtatattttatctaactctttgagttggtcaccgattctaggactagctcgagaatgaataagtactaaaggatgagtacatttcacagaaacactagcattgttcaatgtgctctttacatgggtaaggagttgaaatagctcgtttctatttgttctgacaatatttagtttattcataatgttaagcatatcctgaatagtaaagttagatgtgtcatacttgttagtagttagatatttagcaattgcattcccatcatttctcaatctcgtactccaatcatgcgtggatgctacttcgtcgatggaaaccatacaatcctttttgataggctgttgagattgatcatttcctgcacgtttaggtttggtacgttgatttctagcccctgcggatataaagtcatcgtctacaatttgggacaatgaattgcatacactacaagacaaagatttatcagaagtgtgaatatgatcttcatctaccaaagaaagagtttgattagtataactagattttagtcctgcgttagatgttaaaaaaacatcgctattgaccacggcttccattatttatattcgtagtttttactcgaaagcgtgattttaatatccaatcttattacttttggaatcgttcaaaacctttgactagttgtagaatttgatctattgccctacgcgtatactcccttgcatcatatacgttcgtcaccagatcgtttgtttcggcctgaagttggtgcatatctctttcaacattcgacatgagatccttaagggccatatcgtctagattttgttgagatgctgctcctggatttggattttgttgtgctgttgtacatactgtaccaccagtaggtgtaggagtacatacagtggccacaataggaggttgagaaagtgtaaccgttggagtagtacaagaaatacttccatccgattgttgtgtacatgtagttgttggtaacgtctgagaaggttgggtagatggcggcgtcgtcgttttttgatctttattaaatttagagataatatcctgaacagcattgctcggcgtcaacgctggaaggagtgaactcgccggcgcatcagtatcttcagacagccaatcaaaaagattagacatatcagatgatgtattagtttgttgtcgtggttttggtgtaggagcagtactactaggtagaagaataggagccgatgtagctgttggaaccggctgtggagttatatgaatagttggttgtagcggttggataggctgtctgctggcggccatcatattatctctagctagttgttctcgcaactgtctttgataatacgactcttgagactttagtcctatttcaatcgcttcatcctttttcgtatccggatccttttcttcagaataatagattgacgactttggtgtagaggattctgccagcctctgtgagaacttgttaaagaagtccatttaaggctttaaaattgaattgcgattataagattaaatggcagacacagacgatattatcgactatgaatccgatgatctcaccgaatacgaggatgatgaagaagaggaagaagatggagagtcactagaaactagtgatatagatcccaaatcttcttataagattgtagaatcagcatccactcatatagaagatgcgcattccaatcttaaacatatagggaatcatatatctgctcttaaacgacgctatactagacgtataagtctatttgaaatagcgggtataatagcagaaagctataacttgcttcaacgaggaagattacctctagtttcagaattttctgacgaaacgatgaagcaaaatatgctacatgtaattatacaagagatagaggagggttcttgtcctatagtcatcgaaaagaacggagaattgttgtcggtaaacgattttgacaaagatggtctaaaattccatctagactatattatcaaaatttggaaacttcaaaaacgatattagaatttatacgaatatcgttctctaaatgtcacaatcaagtctcgcatgttcagcaatttattgtcgtactttatatcgtgttcattaacgatatcttgcaaaatagtaatgattctatcttccttcgatagatattcttcagagattattgtcttatattctttcttgttatcagatatgaatttgataagactttgaacattattgatacccgtctgtttaattttttctacagatattttagttttggcagattctatcgtatctgtcaatagacatccaacatcgacattcgacgtcaattgtctataaatcaacgtataaattttagaaataacattagcgaattgttgtgcgttgatgtcgttattctgaaacagtatgattttaggtagcattttcttaacaaagagaacgtatttattgttactcagttgaacagatgatatatccagattactaacgcatctgattccgtataccaaactttcagaagaaatggtatacaattgtttgtattcattcaatgtctctttttcagaaattagtttagagtcgaatactgcaataattttcaagagatagttttcatcagataagattttatttagtgtagatatgataaaactattgttttgttggagaacttgatacgccgcgttctctgtagtcgacgctctcaaatgggaaacaatctccattatttttttggaatcggatactatatcttcggtatcttgacgcagtctagtatacatagagttaagagagattagagtttgtacattaagcaacatgtctctaaatgtggctacaaacttttcctttttcacatcatctagtttattatataccgatttcacaacggcaccagatttaaggaaccagaatgaaaaactctgataactacaatatttcatcatagttacgattttatcatcttctatagttggtgtaatagcgcatacctttttctccaagactggaaccaacgtcataaaaatgtttaaatcaaaatccatatcaacatctgatgcgctaagaccagtctcgcgttcaagattatctttactaatggtgacgaactcatcgtataaaactctaagtttgtccattatttatttacagatttagttgtttaatttatttgtgctcttccagagttgggatagtatttttctaacgtcggtattatattattaggatctacgttcatatgtatcataatattaatcatccacgttttgataaatctatctttagcttctgaaataacgtatttaaacaaaggagaaaaatatttagctacggcatcagacgcaataacattttttgtaaatgtaacgtatttagacgacagatcttcgttaaaaagttttccatctatgtagaatccatcggttgttaacaccattcccgcgtcagattgaataggagtttgaatagtttgttttggaaatagatccttcaataacttatagttgggtgggaaaaaatcgattttatcactagactctttcttttttactatcattacctcatgaactatttcttgaatgagtatatgtattttctttcctatatcggacgcgttcattggaaaatataccatgtcgttaactataagaatatttttatcctcgtttacaaactgaataatatcagatgtagttcgtaaacgaactatatcatcaccagcacaacatctaactatatgatatccactagtttcctttagccgtttattatcttgttccatattagcagtcattccatcatttaagaaggcgtcaaaaataatagggagaaatgacattttggattctgttacaactttaccaaaattaaggatatacggacttactatctttttctcaacgtcaatttgatgaacacacgatgaaaatgtgcttctatgagattgatcatgtagaaaacaacaagggatacaatatttccgcatatcatgaaatatattaagaaatcccaccttattatatttccccaaaggatccatgcacgtaaacattatgccgttatcattaataaagacttctttctcatcggatctgtaaaagttgttactgatttttttcattccaggatctagataattaataatgatgggttttctattcttattctttgtattttggcatatcctagaccagtaaacagtttccactttggtaaaatcagcagacttttgaacgctattaaacatggcattaatggcaataactaaaaatgtaaaatatttttctatgttaggaatatggtttttcactttaatagatatatggtttttggccaaaatgatagatatttttttatccgaggatagtaaaatattattagtcgccgtctctataaaaatgaagctagtctcgatatccaattttattctagaattgataggagtcgccaaatgtaccttatacgttatatctcccttgatgcgttccatttgtgtatctatatcggacacaagatctgtaaatagttttacgttattaatcatcacggtatcgccgtcgctagataacgctaatgtaccatccaagtcccaaatggagagatttaactgttcatcgtttagaataaaatgattaccggtcatattaataaagtgttcatcgtatctagataacaacgacttataattaatgtccaagtcttgaactcgctgaatgatcttttttaacccagttagttttagattggtacgaaatatattgttaaactttgattctacagtaatgtccaaatctagttgtggaaatacttccatcaacattgtttcaaacttgataatattattatctacatcttcgtacgatccaaattccggaatagatgtatcgcacgctctggccacccagataaccaaaaagtcacacgctccaggatatacattgtataaaaagctatcgttttttagtagggtttttttctgcgtgtatacgaagggattaaaaatagtattatcaacgtaactatattccaaattattcttatgagaatagataataatatcgtccttaatatctaacaaatttcctaaatatccctttaattgagtcattcgaagcgtcaatagaatatgtctcttaactatttccggctgttgtatatttaaatgacttcgtaaaaaataatatatgggcgacttctcatctatgtaatcatatggagtgagatatagggctcgttctacctcctgccccttacccacctgtaataccaattgcggacttactatatatcgcatatttatatcgtggggtaaagtgaaaatctactaccgatgatgtaagtcttacaatgttcgaaccagtaccagatcttaatttggaggcctccgtagaactaggggaggtaaatatagatcaaacaacacctatgataaaggagaatagcggttttatatcccgcagtagacgtctattcgcccatagatctaaggatgatgagagaaaactagcactacgattctttttacaaagactttattttttagatcatagagagattcattatttgttcagatgcgttgacgctgtaaaagacgtcactattaccaaaaaaaataacattatcgtggcgccttatatagcacttttaactatcgcatcaaaaggatgcaaacttacagaaacaatgattgaagcattctttccagaactatataatgaacatagtaagaaatttaaattcaactctcaagtatccatcatccaagaaaaactcggataccagtttggaaactatcacgtttatgattttgaaccgtattactctacagtagctctggctattcgagatgaacattcatctggcatttttaatatccgtcaagagagttatctggtaagttcattatctgaaataacatatagattttatctaattaatctaaaatctgatcttgttcaatggagtgctagtacgggcgctgtaattaatcaaatggtaaatactgtattgattacagtgtatgaaaagttacaactggtcatagaaaatgattcacaatttacatgttcattggctgtggaatcaaaacttccaataaaattacttaaagatagaaatgaattatttacaaaattcattaacgagttaaaaaagaccagttcattcaagataagcaaacgcgataaggatacgctactaaaatattttacttaggactggagttagaatttatagacgactcatttcgtttatcattgttactattattactattactatcattattagtgttggcattattagtattcttcttgtcatcttgttcagaaatatacagcaatgctatacctaatactaaatacattatcatgctcgcaatggctctaacaacaacgaaccaaaatgaatttggtcgtagcttttgttcacaaaaatacataaagaaatgtctacataaatctatggcgccattggctacttgaaatagcgccagtcctcctacagattttaatatagctgtataacatgacatttattcatcatcaaaagagacagagtcaccatctgtcatatttagattttttttcatgtgttcaaagtatcctctactcatttcattataatagtttatcatacttagaattttaggacggatcaatgagtaagacttgactagatcgtcagtagtaatttgtgcatcgtctattctgcatccgcttcgtcgaataatgtatagcatcgctttgagattctccatagctatcaagtctttatacaatgacatggaaatatctgtgaatactttatacttctccaacatcgatgccttaacatcatcgcctactttagcattgaaaatacgttctattgtgtagatggatgtagcaagatttttaaacaacaatgccatcttacacgatgattgcctcaagtctccaatcgtttgtttagaacgattagctacagagtccaatgcttggctgactagcatattattatctttagaaattgtattcttcaatgaggcgtttatcatatctgtgatttcgttagtcatattacagtctgactgggttgtaatgttatccaacatatcacctatggatacggtacacgtaccagcatttgtaataatcctatctaagatgttgtatggcattgcgcagaaaatatcttctcctgtaatatctccactctcgataaatctactcagattattcttaaatgccttattctctggagaaaagatatcagtgtccatcatttcattaatagtatacgcagaaaagataccacgagtatcaattctatccaagatacttatcggttccgagtcacagataatggtttcctctccttcgggagatcctgcatagaaatatctaggacaatagtttctatactgtctgtaactctgataatctctaaagtcactaactgataccatgaaattgagaagatcaaacgctgaagtaattaatttttctgcctcgtttttactacaactagttttcatcaatgtagtgacgatgtattgtttagttacttttggtctaatactgatgatagagatattattgcttcccataatggatcttctagtagtcaccttaaagcccattgatgcgaatagcagatagataaagtcttggtatgactcctttctaatatagtacggactacctttgtcacccaactttatacccacataagccataacaacctctttaatagccgtttcatgaggtttatcagccatgagcctgagtagttggaagaatctcatgaatcccgtctcagaaagtcctatatgcatgatagatttatctttcctgggaaactctcgtatagtcatagatgaaatactctttaaagtttctgaaataagattagtaacagtcttacctccgactactctaggtaacaaacaaactctaataggtgttttctctgcggagataatatcagaaaggatagagcaataagtagtattattgtgattataaagaccgaatacataacaggtagaatttataaacatcatgtcctgaaggtttttagacttgtattcctcgtaatccataccgtcccaaaacatggatttggtaactttgatagccgtagatctttgttccttcgccaacaggttaaagaaattaataaagaatttgttgtttctatttatgtccacaaattgcacgtttggaagcgccacggttacattcactgcagcattttgaggatcgcgagtatgaagtacgatgttattgtttactggtatatctggaaagaaatctaccagtctaggaataagagattgatatcgcatagaaatagtaaagtttataatctcatcatcgaagagcattttgttaccattgtaataaatatccactctgtcatatgtataaatgaagtactgttcaaacatgatgagatgtttatatgttggcatagtagtgagatcgacgtttggtaatggcaatgtattaagattaactccataatgtctagcagcatctgcgatgttataagcgtcgtcaaagcggggtcgatcttgtattgttatatattgtctaacacctataagattatcaaaatcttgtctgcttaatacaccgttaacaatttttgccttgaattcttttattggtgcattaataacatccttatagaggatgttaaacaaataagtgttatcaaagttaagatctggatatttcttttctgctagaacatccattgagtcggagccatctggtttaatataaccaccgataaatctagctctgtattctgtatccgtcaatctaatattaagaaggtgttgagtgaaaggtggaagatcgtaaaagctgtgagtattaatgataggattagtttccgaactaatgttaattggggtattaataatatctatatttccagcgttaagtgtaacattaaacagttttaattcacgtgacgtggtatcaattaaataattaatgcccaatttggatatagcagcctgaagctcatcttgtttagttacggatcctaatgagttattaagcaatatatcgaacggatgaacgaaggttgttttaagttggtcacatactttgtaatctagacatagatgcggaagaacggtagaaactatacgaaataaatattcagagtcctctaattgatcaagagtaactattgacttaataggcatcatttatttagtattaaatgacgaccgtaccagtgacggatatacaaaacgatttaattacagagttttcagaagataattatccatctaacaaaaattatgaaataactcttcgtcaaatgtctattctaactcacgttaacaacgtggtagatagagaacataatgccgccgtagtgtcatctccagaggaaatatcctcacaacttaatgaagatctatttccagatgatgattcaccggccactattatcgaacgagtacaacctcatactactattattgacgatactccacctcctacgtttcgtagagagttattaatatcggaacaacgtcaacaacgagaaaaaagatttaatattacagtatcgaaaaatgctgaagcaataatggaatctagatctatgataacttctatgccaacacaaacaccatccttgggagtagtttatgataaagataaaagaattcagatgttagaggatgaagtggttaatcttagaaatcaacgatctaatacaaaatcatctgataatttagataattttaccaaaatactatttggtaagactccgtacaaatcaacagaagttaataagcgtatagccatcgttaattatgcaaatttgaacgggtcccccttatcagtcgaggacttggatgtttgttcggaggatgaaatagatagaatctataaaacgattaaacaatatcacgaaagtagaaaacgaaaaattatcgtcactaacgtgattattattgtcataaacattatcgagcaggcattgctaaaactcggatttgaagaaatcaaaggactgagtaccgatatcacttcagaaattatcgatgtggagatcggagatgactgcgatgctgtagcatctaaactaggaatcggtaacagtccggttcttaatattgtattgtttatactcaagatattcgttaaacgaattaaaattatttaatttaatacattcccatatccagacaacaatcgtctggattaatctgttcctgtcgtctcataccggacgacatattaatctttttattagtgggcatctttttagatggtttctttttcccagcattaactgagtcgatacctagaagatcgtgattgatctctccgaccattccacgaacttctaattggccgtctctgacggtaccataaactattttaccagcattagtaacagcttggacaatctgaccatccatcgcattgtacgatgtagtagtaactgttgttctacgtctaggagcaccagaagtatttttggagcccttggatgttgatgtagaagaagacgaggattttgattttggtttacatgtaatacattttgaactctttgattttgtatcacatgcgccggcagtcacatctgtttgagaattaagattattgttgcctcctttgacggctgcatctccaccgatttgcgctagtagatttttaagctgtggtgtaatcttattaactgtttcgatataatcatcgtaactgcttctaacggctaaattttttttatccgccatttagaagctaaaaatatttttatttatgcagaagatttaactagattatacaatgaactaatatgatccttttccagattatttacaaacttggtattttttggttctggaggaggcgaatttaaattcggacttggattcggattttgtaagttcttgatcttattatacatcgagtataggatggcgacagtaactgctacacaaataccgatcaaaagaagaataccaatcatttattgacaataacttcactattgatcaagtatgcaatatatcatcttttcactaaataagtagtaataatgattcaacaatgtcgagatatatggacgataataatttagttcatggaaatatcgctatgattggtgtgaatgactccgctaactctgtggggtgcgcagtgctttccccacatagaataaattagcattccgactgtgataataataccaagtataaacgccataatactcaatactttccatgtacgagtgggactggtagacttactaaagtcaataaaggcgaagatacacgaaagaatcaaaagaatgattccagcgattagcacgccggaaaaataatttccaatcataagcatcatgtccatttaactaataaaaattttaaatcgccgaatgaacaaagtggaatataaaccatataaaaacaatagtttgtactgcaaaaataatatctatttttgttttcgaagatatggtaaaattaaatagtagtacacagcatgttataactaacagcagcaacggctcgtaattacttatcatttactagacgaaaaggtggtgggatattttcttgctcaaataatacgaatatatcacccatccattttatgcgatgtttatatactctaatctttaatagatctatagacgacgggtttaccaacaatatagattttatcgattcatctaatttaaacccttccttaaacgtgaatgatctattatctggcataacgatgaccctacctgatgaatcggacaatgtactgggccatgtagaataaattatcaacgaattatcgtctacgaacatttatatcatttgttttaattttaggacgcgaataaatggatataaaatagaaaataacagatattacaaccagtgttatggccgcgcccaaccaggtaggcagttttattttatcttttactacaggttctcctggatgtacgtcaccaacggcggacgtagttctagtacaattagacgtaagttccgcttgggaattttttaacgctaaagagttaacgttaatcgtgcacccaacgtatttacatctagttcgttgaacatcttgattataatataaccattttctatctctagattcgtcagtgcactcatgtaaccaacataccctaggtcctaaatatttatctccggaattagattttggataattcgcgcaccaacaatttctatttcctttatgatcgttacaaaagacgtataatgccgtatccccaaaagtaaaataatcaggacgaataattctaataaactcagaacaatatctcgcatccatatgtttggagcaaatatcggaataagtagacatagccggtttccgttttgcacgtaaccattctaaacaattggggtttccaggatcgtttctacaaaatccagtcatgaaatcgtcacaatgttctgtcttgtaattattattaaatatttttggacagtgtttggtatttgtcttagaacaacattttgccacgctatcactatcgcccaggagataatccttttttataaaatgacatcgttgcccggatgctatataatcagtagcgtgttttaaatccttaatatattcaggagttacctcgttctgataatagattaatgatccaggacgaaatttgaaagaactacatggttctccatgaattaatacatattgtttagcaaattcaggaactataaaactactacaatgatctatcgacataccatctatcaaacaaaacttgggtttaatttctcccggagatgtttcataatagtacgtataactttcttctgcaaacttaacagctctattatattcaggataattaaaacctaattccatatatttgtctcgtatatctgctattcctggtgctattttgattctattaagagtaacagctgcccccattcttaataatcgtcagtatttaaactgttaaatgttggtatatcaacatctaccttatttcccgcagtataaggtttgttgcaggtatactgttcaggaatggttacatttatacttcttctatagtcctgtctttcgatgttcatcacatatgcaaagaacagaataaacaaaataatgtaagaaataatattaaatatctgtgaattcgtaaatacattgattgccataataattacagcagctacaatacacacaatagacattcccacagtgttgccattacctccacgatacatttgagttactaagcaataggtaataactaagctagtaagaggcaatagaaaagatgagataaatatcatcaatatagagattagaggagggctatatagagccaagacgaacaaaatcaaaccgagtaacgttctaacatcattatttttgaagattcccaaataatcattcattcctccataatcgttttgcatcatacctccatctttaggcataaacgattgctgctgttcctctgtaaataaatctttatcaagcactccagcacccgcagagaagtcgtcaagcatattgtaatatcttaaataactcatttatatattaaaaaatgtcactattaaagatggagtataatctttatgccgaactaaaaaaaatgacttgtggtcaacccctaagtctttttaacgaagacggggatttcgtagaagttgaaccgggatcatcctttaagtttctgatacctaagggattttacgcctctccttccgtaaagacgagtctagtattcgagacattaacaacgaccgataataaaatcactagtatcaatccaacaaatgcgccaaagttatatcctcttcaacgcaaagtcgtatctgaagtagtttctaatatgaggaaaatgatcgaatcaaaacgtcctctatacatcactcttcacttggcgtgtggatttggtaagactattaccacgtgttatcttatggctacacacggtagaaaaaccgtcatttgcgtacccaataaaatgttaatacatcaatggaagacacaggtagaggcagtcggattggaacataagatatccatagatggagtaagtagtctattaaaggaactaaagactcaaagtccggatgtattaatagtagtcagtagacatctgacaaacgatgccttttgtaaatatatcaataagcattatgatttgttcatcttggatgaatcacatacgtataatctgatgaacaatacagcagttacaagatttttagcgtattatcctccgatgatgtgttattttttaactgctacacctagaccatctaaccgaatttattgtaacagtattattaatattgccaagttatccaatctaaaaaaaactatctatgcagtagatagtttttttgagccatattccacagataatattagacatatggtaaaacgactagatggaccatctaataaatatcatatatataccgagaagttattatctgtagacgagcctagaaatcaacttattcttgataccctggtagaagaattcaagtcaggaactattaatcgcattttagttattactaaactacgtgaacatatggtattattctacaaacgattattagattttttcggaccagaggttgtatttataggagacgcccaaaatagacgtactccagatatggtcaaatcaatcaaggaactaaatagatttatattcgtatccaccttattttattccggtactggtttagatattcctagtttggattcgttgttcatttgctcggcagtaatcaacaatatgcaaatagagcaattactagggagggtatgtcgagaaacagaactattagataggacggtatatgtatttcctaacacatccatcaaagaaataaagtacatgataggaaatttcatgcaacgaattattagtctgtctgtagataaactaggatttaaacaaaaaagttatcggaaacatcaagaatccgatcccacttctgcatgtacaacatcatccagagaagaacgtgtattaaatagaatatttaactcgcaaaatcgttaagaagtttaagcgacgatccgcatgctgcgcaggccagtgtattacccctcatagtattaatataatccaatgatacttttgtgatgtcggaaatcttaaccaatttagactgacaggcagaacacgtcatgcaatcatcatcgtcatcgataactgtagtcttgggcttctttttgcgactcttcattccggaacgcacattggtgctatccatttaggtagtaaaaaataagtcagaatatgccctataacacgatcgtgcaaaacctggtatatcgtctctatctttatcacaatatagtgtatcgacatttttattattattgacctcgtttatcttggaacatggaatgggaacatttttgttatcaacggccatctttgccttaattccagatgttgtaaaattataactaaacagtctatcatcgacacaaatgaaattcttgtttagacgtttgtagtttacgtatgcggctcgttcgcgtctcattttttcagatattgcaggtactataatattaaaaataagaatgaaataacataggattaaaaataaagttatcatgacttctagcgctgatttaactaacttaaaagaattacttagtctgtacaaaagtttgagattttcagattctgcggctatagaaaagtataattctttggtagaatggggaacatctacttactggaaaataggcgtgcaaaaggtagctaatgtcgagacgtcaatatctgattattatgatgaggtaaaaaataaaccgtttaatattgatccgggctattacattttcttaccggtatattttgggagcgtctttatttattcgaagggtaaaaatatggtagaacttggatctggaaactcttttcaaataccagatgatatgcgaagtgcgtgtaacaaagtattagacagcgataacggaatagactttctgagatttgttttgttaaacaatagatggataatggaagatgctatatcaaaatatcagtctccagttaatatatttaaactagctagtgagtacggattaaacatacccaaatatttagaaattgaaatagaggaagacacattatttgacgacgagttatactctattatagaacgctctttcgatgataaatttccaaaaatatccatatcgtatattaagttgggagaacttagacggcaagttgtagactttttcaaattctcattcatgtatattgagtccatcaaggtagatcgtataggagataatatttttattcctagcgttataacaaaatcaggaaaaaagatattagtaaaagatgtagaccatttaatacgatccaaggttagagaacatacatttgtaaaagtaaaaaagaaaaacacattttccattttatacgactatgatggaaacggaacagaaactagaggagaagtaataaaacgaattatagacactataggacgagactattatgttaacggaaagtatttctctaaggttggtagtgcaggcttaaagcaattgactaataaattagatattaatgagtgcgcaactgtcgatgagttagttgatgagattaataaatccggaactgtaaaacgaaaaataaaaaaccaatcagcatttgatttaagcagagaatgtttgggatatccagaagcggattttataacgttagttaataacatgcggttcaaaatagaaaattgtaaggttgtaaatttcaatattgaaaatactaattgtttaaataacccgagtattgaaactatatatggaaactttaaccagttcgtctcaatctttaatgtcgtcaccgatgtcaaaaaaagattattcgagtgaaataatatgcgcctttgatataggtgcaaaaaatcctgccagaactgttttagaagtcaaggataactccgttagggtattggatatatcaaaattagactggagttctgattgggaaaggcgcatagctaaagatttgtcacaatatgaatacactacagttcttctagaacgtcagcctagaaggtcgccgtatgttaaatttatctattttattaaaggctttttatatcatacatcggctgccaaagttatttgcgtctcgcctgtcatgtctggtaattcatatagagatcgaaaaaagagatcggtcgaagcatttcttgattggatggacacattcggattgcgagactccgttccggatagacgcaaattagacgatgtagcggatagtttcaatttggctatgagatacgtattagataaatggaatactaattatacaccttataataggtgtaaatctagaaattacataaaaaaaatgtaataacgttagtaacgccattatggataatctatttacctttctacatgaaatagaagatagatatgccagaactatttttaactttcatctaataagttgcgatgaaataggagatatatatggtcttatgaaagaacgcatttcctcagaggatatgtttgataatatagtgtataataaagatatacatcctgccattaagaaactagtgtattgcgacatccaacttactaaacacattattaatcagaatacgtatccggtatttaacgattcttcacaagtgaaatgttgtcattatttcgacataaactcagataatagcaatattagctctcgtacagtagagatatttgagagggaaaagtcatctcttgtatcatatattaaaactaccaataagaagagaaaggtcaattacggcgaaataaagaaaactgttcatggaggcactaatgcaaattacttttccggtaaaaagtctgacgagtatctgagtactacagttagatccaacattaatcaaccttggatcaaaaccatctctaagaggatgagagttgatatcattaatcactctatagtaacgcgtggaaaaagctctatattacaaactatagaaattatttttactaatagaacatgtgtgaaaatattcaaggattctactatgcacattattctatccaaggacaaggatgaaaaggggtgtatacacatgattgacaaattattctatgtctattataatttatttctgttgttcgaagatatcatccaaaacgagtactttaaagaagtagctaatgttgtaaaccacgtactcacggctacggcattagatgagaaattattcctaattaagaaaatggctgaacacgatgtttatggagttagcaatttcaaaatagggatgtttaacctgacatttattaagtcgttggatcataccgttttcccctctctgttagatgaggatagcaaaataaagttttttaaggggaaaaagctcaatattgtagcattacgatctctggaggattgtataaattacgtgactaaatccgagaatatgatagaaatgatgaaggaaagatcgactattttaaatagcatagatatagaaacggaatcggtagatcgtctaaaagaattgcttctaaaatgaaaaaaaacactaattcagaaatggatcaacgactagggtataagtttttggtgcctgatcctaaagccggagttttttatagaccgttacatttccaatatgtatcgtattctaattttatattgcatcgattgcatgaaatcttgaccgtcaagcggccactcttatcgtttaagaataatacagaacgaattatgatagaaattagcaatgttaaagtgactcctccagattactcacctataatcgcgagtattaaaggtaagagttatgacgcattagccacgttcactgtaaatatctttaaagaggtaatgaccaaagagggtatatccatcactaaaataagtagttatgagggaaaagattctcatttgataaaaattccgctactaataggatacgggaataaaaatccacttgatacagccaagtatcttgttcctaatgtcataggtggagtctttatcaataaacaatctgtcgaaaaagtaggaattaatctagtagaaaagattacaacatggccaaaatttagggttgttaagccaaactcattcactttctcgttttcctccgtatcccctcctaatgtattaccgacaagatatcgccattacaagatatctctggatatatcacaattggaagcgttgaatatatcatcgacaaagacatttataacggtcaatattgttttgctgtctcaatatttatctagagtgagtctagaattcattagacgtagtttatcatacgatatgcctccagaagttgtctatctagtaaacgcgataatagatagtgctaaacgaattactgaatctattactgactttaatattgatacatacattaatgacctggtggaagctgaacacattaaacaaaaatctcagttaacgatcaacgagttcaaatatgaaatgctgcataactttttacctcatatgaactatacacccgatcaactaaagggattttatatgatatctttactaagaaagtttctctactgtatcttccacacttctagatatccagatagagattcgatggtttgtcatcgcatcctaacgtacggcaaatattttgagacgttggcacatgatgaattagagaattacataggcaacatccgaaacgatatcatgaacaatcacaagaacagaggcacttacgcggtaaacattcatgtactaacaactcccggacttaatcacgcgttttctagcttattgagtggaaagttcaaaaagtcagacggtagttatcgaacacatcctcactattcatggatgcagaatatttctattcctaggagtgttggattttatccggatcaagtaaagatttcaaagatgttttctgtcagaaaataccatccaagtcaatatctttacttttgttcatcagacgttccggaaagaggtcctcaggtaggtttagtatctcaattgtctgtcttgagttccattacaaatatactaacgtctgagtatttggatttggaaaagaaaatttgtgagtatatcagatcatattataaagatgatataagttactttgaaacaggatttccaatcactatagaaaatgctctagtcgcatctcttaatccaaatatgatatgtgattttgtaactgactttagacgtagaaaacggatgggattcttcggtaacttggaggtaggtattactttagttagggatcacatgaatgaaattcgcattaatattggagcgggaagattagtcagaccattcttggttgtggataacggagagctcatgatggatgtgtgtccggagttagaaagcagattagacgacatgacattctctgacattcagaaagagtttccgcatgtcatcgaaatggtagatatagaacaatttacttttagtaacgtatgtgaatcggttcaaaaatttagaatgatgtcaaaggatgaaagaaagcaatacgatttatgtgactttcctgccgaatttagagatggatatgtagcatcttcattagtgggaatcaatcacaattctggacccagagctattcttggatgtgctcaagctaaacaagctatctcttgtctgagctcggatatacgaaataaaatagacaatggaattcatttgatgtatccagagaggccaatcgtgattagtaaggctttagaaacttcaaagattgcggctaattgcttcggccaacatgttactatagcattaatgtcgtacaaaggtatcaatcaagaggatggaattatcatcaaaaaacaatttattcagagaggcggtctcgatattgttacagccaagaaacatcaagtagaaattccattggaaaactttaataacaaagaaagagataggtctaacgcctattcaaaattagaaagtaatggattagttagactgaatgctttcttggaatccggagacgctatggcacgaaatatctcatcaagaactcttgaagatgattttgctagagataatcagattagcttcgatgtttccgagaaatataccgatatgtacaaatctcgcgttgaacgagtacaagtagaacttactgacaaagttaaggtacgagtattaaccatgaaagaaagaagacccattctaggagacaaatttaccactagaacgagtcaaaagggaacagtcgcgtatgtcgcggatgaaacggaacttccatacgacgaaaatggtatcacaccagatgtcattattaattctacatccatcttctctagaaaaactatatctatgttgatagaagttattttaacagccgcatattctgctaagccgtacaacaataagggagaaaaccgacctgtctgttttcctagtagtaacgaaacatccatcgatacatatatgcaattcgctaaacaatgttatgagcattcaaatccgaaattgtccgatgaagaattatcggataaaatcttttgtgaaaagattctctatgatcctgaaacggataagccttatgcatccaaagtattttttggaccaatttattacttgcgtctgaggcatttaactcaggacaaggcaaccgttagatgtagaggtaaaaagacgaagctcattagacaggcgaatgagggacgaaaacgtggaggaggtatcaagttcggagaaatggagagagactgtttaatagcgcatggtgcagccaatactattacagaagttttgaaagattcggaagaagattatcaagatgtgtatgtttgtgaaaattgtggagacatagcagcacaaatcaagggtattaatacatgtcttagatgttcaaaacttaatctctctcctctcttaacaaaaattgataccacgcacgtatctaaagtatttcttactcaaatgaacgccagaggcgtaaaagtcaaattagatttcgaacgaaggcctccttcgttttataaaccattagataaagttgatctcaagccgtcttttctggtgtaatattctagtttggtagtagatacatatcaatatcatcaaattcgagatccgaattataaaatgggcgtggattgttaactatagaatcggacgtctgatattcgaaaatctgtggagtttcaggttttggtggaggtgtaactgctacttgggatactgaagtctgatattcagaaagctgtggatgttctggttcggcatccaccgatggtgtcacatcactaatcggttcggtaacgtctgtggatggaggtgctacttctacagaacctgtagcctcagttgtcaacggagatacatttttaatgcgagaaaatgtataatttggtaatggtttcttatgtggatctgaagaagaggtaagatatctactagaaagataccgatcacgttctagttctcttttgtagaacttaactttttctttctccgcatctagttgatattccaacctcttcacgttactacgttcagattccaattcacgttcgcatgggttacctccgcagtttttacgagcgatttcacgttcagccttcatgcgtctctccctctctctatcgagtttatcagagcagtctttctgaaggcgatcgaactccataaatttctccaacgctttgattgtttccatagatttccgaagttcagcttttaggactgtgattctttttctttcgaattcacagctggatgtacaaccgtttccattaccgccatctctaagtttcttttctagatcggcaacatttcatccccatgccttttacattcctcgagtctactgtcgtcgaaatatcgttccagctccttttcgacatcaataactttagcacgttgtctctcaagctctcttttgtagttatctgattccctggcacgtttaagatcttcatgcaattgagtcagctcttaacttcctctcttgcttcttcgtcatagtacgcgcaatcactgtgagatccattgttaccacgtctacactcggcgagctcgcgtttaagagattcaatttcccgtttgtattggtccatgtttccattgctaccaccattagatttacaggctgctagttgtcgttcgagatcagaaatacgggttttcttggaattgatttcgtcgatgtacttggcatcgaaacacttattaagttctttttccaattctacgattttatttctttcgcgagtcaattccctcctgtagtaactatctgttttgtcagattcacgctctctacgtagactttcttgcaagttactaatttgttccctagcacgtccgagtttagttttatatgctgaatagagttctgattcatcctttgagcagatctctagcgatcgtttaagattcctaattctagtctttagcctatttacctcctcagaagatgttccgttaccgttgcgtttacactcgttaagctgtctatcaagatccatgattctatctctaagacgttgcatctctctttccatatcagcattgctttcattattacgtctgcagtcactcaactgtctttcaatatctgagattctatctctaagacgtcgcatctctctctgtttcggcattggtttcattattacgtttacagtcgttcaactgtctttcaagatctgatattctagattggagtctgctaatctctgtagcattttcacggcattcactcagttgtctttcaagatctgaaattttagattggagtctgctaatctctgtaagatttcctcctccgctctcgatgcagtcggtcaacttattctctagttctctaatacgcgaacgcagtgcatcaacttcttgcgtgtcttcctggttgcgtgtacattcatcgagatctctaacgcgtcgtcgttcttcctcaagttctctgcgtactacagaaagcgtgtccctatcttgttgatatttagcaatttctgattctagagtactgattttgcttacgtagttactaatagttgtcttggccttatcaagatcctccttgtatttgtcgcattccttgatatccctacgaagtctggacagttcccattcgacattacgacgtttatcgatttcagctcggagatcgtcatcgcgttgttttagccacatacgactgagttcaagttctcgttgacaagatccatctacttttccattcctaatagtatccagttccttttctagttctgaacgcatttctcgttccctatcaagcgattctctcaattctcggatagtcttcttatcaatttctaataaatctgaaccatcatctgtcccattttgaatatccctgtgttctttgatctcttttgtaagtcggtcgattctttcggttttataaacagaatccctttccaaagtcctaatcttactgagtttatcactaagttctgcattcaattcggtgagttttctcttggcttcttccaactctgttttaaactctccactatttccgcattcttcctcgcatttatctaaccattcaattagtttattaataactagttggtaatcagcgattcctatagccgttcttgtaattgtgggaacataattaggatcttctaatggattgtatggcttgatagcatcatctttatcattattagggggatggacaaccttaattggttggtcctcatctcctccagtagcgtgtggttcttcaataccagtgttagtaataggcttaggcaaatgcttgtcgtacgcgggcacttcctcatccatcaagtatttataatcgggttctacttcagaatattcttttctaagagacgcgacttcgggagttagtagaagaactctgtttctgtatctatcaacgctggaatcaatactcaagttaaggatagcgaatacctcatcgtcatcatccgtatcttctgaaacaccatcatatgacatttcatgaagtctaacgtattgataaatagaatcagatttagtattaaacagatccttaacctttttagtaaacgcatatgtatattttagatctccagatttcataatatgatcacatgccttaaatgtcagtgcttccatgatataatctggaacactaatgggtgacgaaaaagatacagcaccatatgctacgttgataaataaatctgaaccactaagtagataatgattaatgttaagaaagaggaaatattcagtgtataggtatgtcttggcgtcatatcttgtactaaacacgctaaacagtttgttaatgtgatcaatttccaatagattaattagagcagcgggaataccaacaaacatattaccacatccgtattttctatgaatatcacatatcatgttaaaaaatcttgatagaagagcgaatatctcgtctgacttaatgagtcgtagttcagcagcaacataagtcataactgtaaatagaacatactttcctgtagtgttgattctagactccacatcaacaccattattaaaaatagttttatatacatctttaatctgctctccgttaatcgtcgaacgttctagtatacggaaacactttgatttcttatctgtagttaatgacttagtgatatcacgaagaatattacgaattacatttcttgtttttcttgagagacctgattcagaactcaactcatcgttccatagtttttctacctcagtggcgaaatctttggagtgcttggtacatttttcaataaggttcgtgacctccatttattataaaaaatttattcaaaacttaactacaatcgggtaattataagatcgtagatctcccatgtggcggaatactaccatctatcgcatgtggatggacagtaggtaatggccatgggaacagtaatgtttgcatatttatctttcttgctagtattactgcatattgtcccaatgtttcgatgtgatgttctaacctatcaactgccgctgtatcacaacaatagtgtccgatgaaattaagattatgatccaatgtgtttaatatatgattatcaagtcttatacgatccgcgtcttttttgacaggatcaggttcttctacaggaagaagtttcggcctcttatgatattcatgtctgggaaacggtggtctagggtgaggctccggtatcggagtgggttttggattataatcatcatcgtctatgacatcatcttcgacttcgatatttattttgctatcttgatgatgtcctgtatcagttgcattttcagcactcgactgaatattagcgcattcattgtctattattaccatatttctaaacccaaaatgtatgtgttgaacatcagtactatcgttgatgagtcttatagcatgaattcgcttatcgttatcgggtttatcttctgtcaccttagcaattccttttttattaaactctacataatcatatccatttctattgtttgttctaatataaacgagtatagcatcattgctaaatttttcaatagtatcaaaaacagaatatcctaaaccatataatatatattcaggaacactcaaactaaatgtccaggattctcctaaatacgtaaactttaatagtgcgaaatcattcaaaaatctaccacttatagatagatagtacataaatgcgtatagtagtctacctatctctttattatgaaaaccggcattacgatcatatatgtcgtgatatacctgtgatccgtttacgttaaaccataaatacatgggtgatcctataaacatgaatttatttctaattctcagagctatagttaattgaccgtgtaatatttgcttacatgcatacttgatacgcttattaataagatttttatcattgctcgttatttcagaatcgtatatataaggagtaccatcgtgattcttaccagatattatacaaaatactatatataaaatatattgacccacgttagtaatcatataaatgtttaacgttttaaattttgtattcaatgatccattatcatacgctatcatggtcttgtaatattcattctttaaaatataatattgtgttagccattgcattggagctcctaatggagattttctattctcatccattttaggataggctttcataaagtccctaataacttcgtgaataatgtttctatgttttctactgatgcatgtatttgcttcgatttttttatcccatgtttcatctatcatagatttaaacgcagtaatgctcgcaacattaacatcttgaaccgttggtacaattccgttccataaatttataatgttcgccatttatataactcattttttgaatatacttttaattaacaaaagagttaagttactcatatggacgccgtccagtctgaacatcaatctttttagccagagatatcatagccgctcttagagtttcagcgtgattttccaacctaaatagaacttcatcgttgcgtttacaacacttttctatttgttcaaactttgttgttacattagtaatctttttttccaaattagttagccgttgtttgagagtttcctcattgtcgtcttcatcggctttaacaattgcttcgcgtttagcctctggctttttagcagcctttgtagaaaaaaattcagttgctggaattgcaagatcgtcatctccggggaaaagagttccgtccatttaaagtacagattttagaaactgacactctgcgttatttatatttggtacaacacatggattataaatattgatgttaataacatcagaaaatgtaaagtctatacattgttgcatcgtgttaaattttctaatggatctagtattattgggtccaacttctgcctgaaatccaaatatggaagcggatacaaaaccgtttcctggataaaccacacatctccacttttgctttacatcagaaattgtgtcgttgacatcttgaactctcctatctaatgccggtgttccacctatagattttgaatattcgaatgctgcatgagtagcattaaattccttaatattgccataattttcatatattgagtaaccctggataaaaagtaaacacaccgcagccgtcgctaccacaataaaaaaaattgatagagagttcatttataatctattagaagctgacaaaatttttttacacgcatcagacaatgctttaataaatagttcaacatctacttttgtcatatcgaaccgatggtatgattctaacctagaattacatccgaaaaagttgactatgttcatagtcattaagtcattaacaaacaacattccagactctggattataagacgatactgtttcgtcacaattacctaccttaatcatgtgattatgaatattggctattagagcaccttctaagaaatctataatatctttgaaacacgatttaaaatcaaaccacgaatatacttctacgaagaaagttagtttacccataggagaaataactataaatggagatctaaatacaaaatccggatctatgatagttttaacattattatattctctattaaatacctccacatctaaaaatgttaattttgaaactatgtcttcgtttattaccgtacctgaactaaacgctataagctctattgtttgagaactctttaaacgatattcttgaaatacatgtaacaaagtttcctttaactcggtcggtttatctaccatagttacagaatttgtatccttatctataatataataatcaaaatcgtataaagttatataattatcgcgttcagattgtgatcttttcaaatagactaaaaaccccatttctctagtaagtatcttatgtatatgtttgtaaaatatcttcatggtgggaatatgctctaccgcagttagccattcctcattgacagcggtagatgtattagacaaaactattccaatgtttaacaagggccattttacgagattattaaatccttgtttgataaatgtagccaatgagggttcgagttcaacgacgattgaattctcttcccgcggatgctgcatgatgaacgacgggatgttgttcgattgatttggaattctttttcgactttttgtttatattaaatattttaaaatttatagcggatagcaattcatgtaccacggataatgtagacgcgtattgcgcatcgatatctttattattagataaatttatcaataaatgtgagaagtttgcctcgttaaggtcttccatttaaatattatataaacatttgtgtttgtatcttattcgtcttttatggaatagttttttactagtaaagctgcaattacacactttgtccgtaaaacataaatataaacaccagcttttatcaatcgttccaaaaagtcgacggcggacatttttaacatggcatctattttaaatacacttaggtttttggaaaaaacatcattttataattgtaacgattcaataactaaagaaaagattaagattaaacataagggaatgtcatttgtattttataagccaaagcattctaccgttgttaaatacttgtctggaggaggtatatatcatgatgatttggttgtattggggaaggtaacaattaataatctaaagatgatgctattttacatggatttatcatatcatggagtgacaagtagtggagcaatttacaaattgggatcgtctatcgatagactttctctaaataggactattgttacaaaagttaataattatgatgatacattttttgacgacgatgattgatcgctattgcacaattttgtttttgtactttctaatatagtgtttaggttctttttcatatgagaatattgatttactaaaatatctatgtttaacttttgttctatgacgtccttatcggcggtatcggtacatatacgtaattcaccttcacaaaatacggagtcttcgataataatagccaatcgattattggatctagctgtctgtatcatattcaacatgtttaatatatcctttcgtttcccctttacaggcatcgatcgtagcatattttccgcgtctgatatggaaatgttaaaactacaaaaatgcgtaatgttagcccgtcctaatattggtacgtgtctataagtttggcatagtagaataatagacgtgtttaaatgccttccaaagtttaagaattctattagagtattgcattttgatagtttatcgcctacatcatcaaaaataagtaaaaagtgtgctgattttttatgattttgtgcgacagcaatacatttttctatgttacttttagttcgtatcagattatattctagagattcctgactactaacgaaattaatatgatttggccaaatgtatccatcataatctgggttataaacgggtgtaaacaagaatatatgtttatattttttaactagtgtagaaaacagagatagtaaatagatagtttttccagatccagatcctcctgttaaaaccattctaaacggcatttttaataaattttctcttgaaaattgtttttcttggaaacaattcataattatatttacagttactaaattaatttgataataaatcaaaatatggaaaactaaggttgttagtagggaggagaacaaagaaggcacatcgtgatataaataacatttattatcatgatgacaccagaaaacgacgaagagcagacatctgtgttctccgctactgtttacggagacaaaattcagggaaagaataaacgcaaacgcgtgattggtctatgtattagaatatctatggttatttcactactatctatgattaccatgtccgcgtttctcatagtgcgcctaaatcaatgcatgtctgctaacgaggctgctattactgacgccgctgttgccgttgctgctgcatcatctactcatagaaaggttgcgtctagcactacacaatatgatcacaaagaaagctgtaatggtttatattaccagggttcttgttatatattacattcagactaccagttattctcggatgctaaagcaaattgcactgcggaatcatcaacactacccaataaatccgatgtcttgactacctggctcattgattatgttgaggatacatggggatctgatggtaatccaattacaaaaactacatccgattatcaagattctgatgtatcacaagaagttagaaagtatttttgtgttaaaacaatgaactaatatttatttttgtacattaataaatgaaatcgcttaatagacaaactgtaagtaggtttaagaagttgtcggtgccggccgctataatgatgatactctcaaccattattagtggcataggaacatttctgcattacaaagaagaactgatgcctagtgcttgcgccaatggatggatacaatacgataaacattgttatttagatactaacattaaaatgtctacagataatgcggtttatcagtgtcgtaaattacgagctagattgcctagacctgatactagacatctgagagtattgtttagtattttttataaagattattgggtaagtttaaaaaagaccaatgataaatggttagatattaataatgataaagatatagatattagtaaattaacaaattttaaacaactaaacagtacgacggatgctgaagcgtgttatatatacaagtctggaaaactggttaaaacagtatgtaaaagtactcaatctgtactatgtgttaaaaaattctacaagtgacaacaaaaaatgaattaataataagtcgttaacgtacgccgccatggacgccgcgtttgttattactccaatgggtgtgttgactataacagatacattgtatgatgatctcgatatctcaatcatggactttataggaccatacattataggtaacataaaaactgtccaaatagatgtacgggatataaaatattccgacatgcaaaaatgctactttagctataagggtaaaatagttcctcaggattctaatgatttggctagattcaacatttatagcatttgtgccgcatacagatcaaaaaataccatcatcatagcatgcgactatgatatcatgttagatatagaagataaacatcagccattttatctattcccatctattgatgtttttaacgctacaatcatagaagcgtataacctgtatacagctggagattatcatctaatcatcaatccttcagataatctgaaaatgaaattgtcgtttaattcttcattctgcatatcagacggcaatggatggatcataattgatgggaaatgcaatagtaattttttatcataaaagttgtaaagtaaataataaaacaataaatattgaactagtagtacgtatattgagcaatcagaaatgatgctggtacctcttatcacggtgaccgtagttgcgggaacaatattagtatgttatatattatatatttgtaggaaaaagatacgtactgtctataatgacaataaaattatcatgacaaaattaaaaaagataaagagttctaattccagcaaatctagtaaatcaactgatagcgaatcagactgggaggatcactgtagtgctatggaacaaaacaatgacgtagataatatttctaggaatgagatattggacgatgatagcttcgctggtagtttaatatgggataacgaatccaatgttatggcgcctagcacagaacacatttacgatagtgttgctggaagcacgctgctaataaataatgatcgtaatgaacagactatttatcagaacactacagtagtaattaatgaaacggagactgttgaagtacttaatgaagataccaaacagaatcctaactattcatccaatcctttcgtaaattataataaaaccagtatttgtagcaagtcaaatccgtttattacagaacttaacaataaatttagtgagaataatccgtttagacgagcacatagcgatgattatcttaataagcaagaacaagatcatgaacacgatgatatagaatcatcggtcgtatcattggtgtgattagtttcctttttataaaattgaagtaatatttagtattattgctgccgtcacgttgtacaaatggagatattccctgtattcggcatttctaaaattagcaattttattgctaataatgactgtagatattatatagatacagaacatcaaaaaattatatctgatgagatcaatagacagatggatgaaacggtacttcttaccaacatcttaagcgtagaagttgtaaatgacaatgagatgtaccatcttattcctcatagattatcgacgattatactctgtattagttctgtcggaggatgtgttatctctatagataatgacatcaatggcaaaaatattctaacctttcccattgatcatgctgtaatcatatccccactgagtaaatgtgtcgtagttagcaagggtcctacaaccatattggttgttaaagcggatatacctagcaaacgattggtaacatcgtttacaaacgacatactatatgtaaacaatctgtcactgattaattatttgccgttgtctgtattcattattagacgagtcaccgactatttggatagacacatatgcgatcagatatttgctaataataagtggtattcccttataaccatcgacgataagcaatatcctattccatcaaactgtataggtatgtcctctgccaagtacataaattctagcatcgagcaagatactttaatccatgtttgtaacctcgagcatccgttcgactcagtatacaaaaaaatgcagtcgtacaattctctacctatcaaggaacaaatattgtacggtagaattgataatataaatatgagcattagtatttctgtggattaatagatttctagtatggggatcattaatcatctctaatctctaaatacctcataaaacgaaaaaaaagctattatcaaatactgtacggaatggattcattctcttctctttttatgaaactctgttgtatatctactgataaaactggaagcaaaaaatctgatagaaagaataagaataagatcaaggattatatggaacacgattattataaaataacaatagttcctggttcctcttccacgtctactagctcgtggtattatacacatgcctagtaatagtctctttgcgttgacggaaagcagactagaaataacaggctaaaatgttcagacaccataatagttcccaacccagataataacagagttccatcaacacattcctttaaactcaatcccaaacccaaaaccgttaaaatgtatccggccaattgatagtagataatgaggtgtacagcgcatgataatttacacagtaaccaaaatgaaaatactttagtaattataagaaatatagacggtaatgtcatcatcaacaatccgataatatgcctgagagtaaacattgacggataaaacaaaaatgctccgcataactctatcatggcaataacacaaccaaatacttgtaagattcctaaattagtagaaaatacaacgaatatcgatgtataagtgatctcgagaaataataagaataaagtaatgcccgtaaagataaacatcaacattgtttggtaatcattaaaccaattagtatgaagttgaactaatttcacagtagattttattccagtgttatcctcgcatgtataagtacctggtaagatatctttatattccataatcaatgagacatcactatctgataacgaatgaagtctagcactagtatgccatttacttaatattgtcgtcttggaagttttattataagttaaaatatcatggttatccaatttccatctaatatactttgtcggattatctatagtacacggaataatgatggtatcattacatgctgtatactctatggtctttgtagttgttataacaaccaacgtatagaggtatatcaacgatattctaactcttgacattttttatttatttaaaatgatacctttgttatttattttattctattttgctaacggtattgaatggcataagtttgaaacgagtgaagaaataatttctacttacttattagacgacgtattatacacgggtgttaatggggcggtatacacattttcaaataataaactaaacaaaactggtttaactaataataattatataacaacatctataaaagtagaggatgcggataaggatacattagtatgcggaaccaataacggaaatcccaaatgttggaaaatagacggttcagacgacccaaaacatagaggtagaggatacgctccttatcaaaatagcaaagtaacgataatcagtcacaacggatgtgtactatctgacataaacatatcaaaagaaggaattaaacgatggagaagatttgacggaccatgtggttatgatttattcacggcggataacgtaattccaaaagatggtttacgaggagcattcgtcgataaagacggtacttatgacaaagtttacattcttttcactgatactatcggctcaaagagaattgtcaaaattccgtatatagcacaaatgtgcctaaacgacgaaggtggtccatcatcattgtctagtcatagatggtcgacgtttctcaaagtcgaattagaatgtgatatcgacggaagaagttatagacaaattattcattctagaactataaaaacagataatgatacgatactatatgtattcttcgatagtccttattccaagtccgcattatgtacctattctatgaataccattaaacaatctttttctacgtcaaaattggaaggatatacaaagcaattgccgtctccagctcctggtatatgtttaccagctggaaaagttgttccacataccacgtttgaagtcatagaacaatataatgtactagatgatattataaagcctttatctaaccaacctatcttcgaaggaccgtctggtgttaaatggttcgatataaaggagaaggaaaatgaacatcgggaatatagaatatacttcataaaagaaaattctatatattcgttcgatacaaaatctaaacaaactcgtagctcgcaagtcgatgcgcgactattttcagtaatggtaactgcgaaaccgttatttatagcagatatagggataggagtaggaatgccacaaatgaaaaaaatacttaaaatgtaatcttaatcgagtacaccacacgacaatgaacaaacataagacagattatgctggttatgcttgctgcgtaatatgcggtctaattgtcggaattatttttacagcgacactattaaaagttgtagaacgtaaattagttcatacaccattaatagataaaacgataaaagatgcatatattagagaagattgtcctactgactggataagctataataataaatgtatccatttatctactgatcgaaaaacctgggaggaaggacgtaatgcatgcaaagctctaaattcaaattcggatctaattaagatagagactccaaacgagttaagttttttaagaagccttagacgaggctattgggtaggagaatccgaaatattaaaccagacaaccccatataattttatagctaagaatgccacgaagaatggaactaaaaaacggaaatatatttgtagcacaacgaatactcccaaactgcattcgtgttacactatataacaattacactacatttttatcataccactacttcggttagatgttttagaaaaaaataaatatcgccgtaccgttcttgtttttataaaaataacaattaacaattatcaaattttttctttaatattttacgtggttgaccattcttggtggtaaaataatctcttagtgttggaatggaatgctgtttaatgtttccacactcatcgtatattttgacgtatgtagtcacatcgtttacgcaatagtcagactgtagttctatcatgcttcctacatcagaaggaggaacagttttaaagtctcttggttttaatctattaccgttagttttcatgaaatcctttgttttatccacttcacattttaaataaatgtccactatacattcttttgttaattttactagatcgtcatgggtcatagaatttataggttccgtagtccatggatccaaactagcaaacttcgcgtatacggtatcgcgattagtgtatacaccaactgtatgaaaattaagaaaacagtttaataaatcaacagaaatatttaatcctccgtttgatacagatgcgccatatttatggatttcggattcacacgttgtttgtctgaggtgttcgtctagtgttgcttctacgtaaacttcgattcccatatattctttattgtcagaatcgcataccgatttatcatcatacactgtttgaaaactaaatggtatacacatcaaaataataaataataacgagtacattctgcaatattgttatcgtaattggaaaaatagtgttcgagtgagttggattatgtgagtattggattgtatattttattttatattttgtaataagaataaaatgctaatgtcaagtttattccaatagatgtcttattaaaaacatatataataaataacaatggctgaatggcataaaattatcgaggatatctcaaaaaataataagttcgaggatgccgccatcgttgattacaagactacaaagaatgttctagctgctattcctaacagaacatttgccaagattaatccgggtgaaattattcctctcatcactaatcgtaatattctaaaacctcttattggtcagaaatattgtattgtatatactaactctctaatggatgagaacacgtatgctatggagttgcttactgggtacgcccctgtatctccgatcgttatagcgagaactcataccgcacttatatttttgatgggtaagccaacaacatccagacgtgacgtgtatagaacgtgtagagatcacgctacccgtgtacgtgcaactggtaattaaaataaaaagtaatattcatatgtagtgtcaattttaaatgatgatgatgaaatggataatatccatattgacgatgtcaataatgccggtattggcatacagttcatcgatttttagatttcattcagaggatgtggaattatgttatgggcatttgtattttgataggatctataatgtagtaaatataaaatataatccgcatattccatatagatataattttattaatcgcacgttaaccgtagatgaactagacgataatgtcttttttacacatggttattttttaaaacacaaatatggttcacttaatcctagtttgattgtctcattatcaggaaacttaaaatataatgatatacaatgctcagtaaatgtatcgtgtctcattaaaaatttggcaacgagtacatctactatattaacatctaaacataagacttattctctacatcggtccacgtgtattactataataggatacgattctattatatggtataaagatataaatgacaagtataatgacatctatgattttactgcaatatgtatgctaatagcgtctacattgatagtgaccatatacgtgtttaaaaaaataaaaatgaactcttaattatgctatgctattagaaatggataaaatcaaaattacggttgattcaaaaattggtaatgttgttaccatatcgtataacttggaaaagataactattgatgtcacacctaaaaagaaaaaagaaaaggatgtattattagcgcaatcagttgctgtcgaagaggcaaaagatgtcaaggtagaagaaaaaaatattatcgatattgaagatgacgatgatatggatgtagaaagcgcgtaatacgatctataaaaataagtatataaatactttttatttactgtactcttactgtgtagtggtgataccctactcgattatttttttaaaaaaaaaatacttattctgattcttctagccatttccgtgttcgtttgaatgccacatcgacgtcaaagataggggagtagttgaaatctagttctgcattgttggtacgcacctcaaatgtagtgttggatatcttcaacgtatagttgttgagtagtgatggttttctaaatagaattctcttcatatcattcttgcacgcgtacatttttagcatccatcttggaatcctagatccttgttctattcccaatggtttcatcaatagaagattaaacatatcgtacgaacacgatggagagtaatcgtagcaaaagtaagcatttcctttaatcttagatcccggatactggatatattttgcagccaacacgtgcatccatgcagcatttcctacatatacccggctatgcaccgcgtcatcatcgactgtacgatacataatgttaccgtgttgcttacattgctcgtaaaagactttcatcaatttgtctccttctccgtaaattccagtgggtcttaggcaacaagtatacaattttgctccattcatgattacggaattattggctttcataaccagttgctcggccatacgtttactttttgcgtatacatgtcctggtgatatatcataaagggtatgctcatggccgatgaatggatcaccgtgtttattgggtcctattgcttccatgctactagtatagatcaaatacttgattcctaggtccacacaagctgccaaaatagtctgtgttccataatagtttactttcatgatttcattatcggtgtattttccaaatacatccactagagcagccgtatgaataatcagatttaccccatctagcgcttctctcaccttatcaaagtcgtttatatcacattgtatatagtttataaccttaactttcgaggttattggttgtggatcttctacaatatctatgactctgatttcttgaacatcatctgcactaattaacagttttactatatacctgcctagaaatccggcaccaccagtaaccgcgtacacggccattgctgccactcataatatcagactacttattctattttactaaataatggctgtttgtataatagaccacgataatatcagaggagttatttactttgaaccagtccatggaaaagataaagttttaggatcagttattggattaaaatccggaacgtatagtttgataattcatcgttacggagatattagtcaaggatgtgattccataggcagtccagaaatatttatcggtaacatctttgtaaacagatatggtgtagcatatgtttatttagatacagatgtaaatatatttacaattattggaaaggcgttatctatttcaaaaaatgatcagagattagcgtgtggagttattggtatttcttacataaatgaaaagataatacattttcttacaattaacgagaatggcgtttgatatatcagttaatgcgtctaaaacaataaatgcattagtttacttttctactcagcaaaataaattagtcatacgtaatgaagttaatgatacacactacactgtcgaatttgatagggacaaagtagttgacacgtttatttcatataatagacataatgacaccatagagataagaggggtgcttccagaggaaactaatattggttgcgcggttagtatgacttacttgtataataagtatagttttaaactgattttagcagaatatataagacacagaaatactatatccggcaatatttattcggcattgatgacactagatgatttggctattaaacagtatggagacattgatctattatttaatgagaaacttaaagtagactccgattcgggactatttgactttgtcaactttgtaaaggatatgatatgttgtgattctagaatagtagtagctctatctagtctagtatctaaacattgggaattgacaaataaaaaatataggtgtatggcattagccgaacatatatctgatagtattccaatatctgagctatctagactacgatacaatctatgtaagtatctacgcggacacactgagagcatagaggataaatttgattattttgaagacgatgattcgtctacatgttctgccgtaaccgacagggaaacggatgtataattttttttatagcgtgaaggatatgataaaaaatataattgttgtatttatcccattccaatcaccttatatgattctgtaacacaataaaggagtcttatagatgtatagaggtcagatactggtttgataaactgtttattccacataagtatgtttgactttatggttagacccgcatactttaacaaatcactgaaaattggagttaggtattgacctctcagaatcagttgccgttctggaacattaaatgtattttttatgatatactccaacgcatttatgtgggcatacaacaagtcattactaatggaatattccaagagttttagttgtctagtatttaacaagagaagagatttcaacagactgtttatgaactcgaatgccgcctcattgtcgcttatattgatgatgtcgaattctcccaatatcatcaccgatgagtagctcatcttgttatcgggatccaagttttctaaagatgtcattaaaccctcgatcatgaatggatttatcatcatcgtttttatgttggacatgagcttagtccgtttgtccacatctatagaagatgatttctgaattatttcatatatctctctctttaactccaggaacttgtcaggatggtctactttaatatgttctcgtctaagagatgaaaatctttggatggttgcacgcgacttttctctaaaggatgacgttgcccaagatcctctcttaaatgaatccatcttatccttggacaagatggacagtctattttccttagatggtttaatatttttgttacccatgatctataaaggtagacctaatcgtctcggatgaccatatatttattttcagttttattatacgcataaattgtaaaaaatatgttaggtttacgaaaatgtctcgtggggcattaatcgtttttgaaggattggacaaatctggaaaaacaacacaatgtatgaacatcatggaatcaataccttcaaacacaataaaataccttaactttcctcagagatccactgtcactggaaagatgatagatgactatctaactcgtaaaaaaacctataatgatcatatagttaatctattattttgtgcaaatagatgggagtttgcatcttttatacaagaacaactagaacagggaattactttaatagttgatagatacgcattttctggagtagcgtatgccgccgctaaaggcgcgtcaatgactctcagtaagagttatgaatctggattgcctaaacccgacttagttatattcttggaatctggtagcaaagaaattaatagaaacgtcggtgaggaaatttatgaagatgttacattccaacaaaaggtattacaagaatataaaaaaatgattgaagaaggagatattcattggcaaattatttcttctgaattcgaggaagatgtaaagaaggagttgattaagaatatagttatagaggctatacacacggttactggaccagtggggcaactgtggatgtaatagtgaaattacattttttataaatagatgttagtacagtgttataaatggatgaagcatattactctggcaacttggaatcagtactcggatacgtgtccgatatgcataccgaactcgcatcaatatctcaattagttattgccaagatagaaactatagataatgatatattaaacaaggacattgtaaattttatcatgtgtagatcaaacttggataatccatttatctctttcctagatactgtatatactattatagatcaagagaactatcagactgagttgattaattcattagacgacaatgaaattatcgattgtatagttaataagtttatgagcttttataaggataacctagaaaatatagtagatgctatcattactctaaaatatataatgaataatccagattttaaaactacgtatgccgaagtactcggttccagaatagccgatatagatattaaacaagtgatacgtaagaatatactacaattgtctaataatatccgcgaacgatatttgtgaaaatattaaaaaaaaatactttttttattaaatgacgtcttttcgtgaatttagaaaattatgctgtgctatatatcacgcatcaggatataaagaaaaatctaaattaattagagactttataacagatagggatgataaatatttgatcattaagctattgcttcccggattagacgatagaatttataacatgaacgataaacaaattataaaattatatagtataatatttaaacaatctcaggaagatatgctacaagatttaggatacggatatataggagacactattaggactttcttcaaagagaacacagaaatccgtccacgagataaaagcattttaactttagaagaagtggatagttttttaactacgttatcatccgtaactaaagaatcgcatcaaataaaattattgactgatgtagcatctgtttgtacatgtaatgatttaaaatgtgtagtcatgcttattgataaagatctaaaaattaaagcgggtcctcggtacgtacttaacgctattagtcctaatgcctatgatgtgtttagaaaatctaataacttgaaagagataatagaaaattcatctaaacaaaatctagactctatatctatttctgttatgactccaattaatcccatgttagcggaatcgtgtgattctgtcaataaggcgtttaaaaaatttccatcaggaatgtttgcggaagtcaaatacgatggtgaaagagtacaagttcataaaaataataacgagtttgccttctttagtagaaacatgaaaccagtactctctcataaagtggattatctcaaagaatacataccgaaagcatttaaaaaagctacgtctatcgtattggattctgaaattgttcttgtagacgaacataatgtaccgctcccgtttggaagtttaggtatacacaaaaagaaagaatataaaaactctaacatgtgtttgttcgtgtttgactgtttgtactttgatggattcgatatgacggacattccattgtacgaacgaagatcttttctcaaagatgttatggttgaaatacccaatagaatagtattctcagagttgacgaatattagtaacgagtctcagttaactgacgtattggatgatgcactaacgagaaaattagaaggattggtcttaaaagatattaatggagtatacgaaccgggaaagagaagatggttaaaaataaagcgagactatttgaacgagggttccatggcagattctgccgatttagtagtactaggtgcctactatggtaaaggagcaaagggtggtatcatggcagtctttctaatgggttgttacgacgatgaatccggtaaatggaagacggttaccaagtgttcaggacacgatgataatacgttaagggagttgcaagaccaattaaagatgattaaaattaacaaggatcccaaaaaaattccagagtggttagtagttaataaaatctatattcccgattttgtagtagaggatccgaaacaatctcagatatgggaaatttcaggagcagagtttacatcttccaagtcccataccgcaaatggaatatccattagatttcctagatttactaggataagagaggataaaacgtggaaagaatctactcatctaaacgatttagtaaacttgactaaatcttaatagttacatacaaactgaaaattaaaataacactatttagttggtggtcgccatggatggtgttattgtatactgtctaaacgcgctagtaaaacatggcgaggaaataaatcatataaaaaatgatttcatgattaaaccatgttgtgaaagagtttgtgaaaaagtcaagaacgttcacattggcggacaatctaaaaacaatacagtgattgcagatttgccatatatggataatgcggtatccgatgtatgcaattcactgtataaaaagaatgtatcaagaatatccagatttgctaatttgataaagatagatgacgatgacaagactcctactggtgtatataattattttaaacctaaagatgccattcctgttatcatatctataggaaaggataaagatgtctgtgaactattaatctcatcagacatatcgtgtgcatgcgtggagttaaattcatatcacgtagccattcttcccatggatgtttccttttttaccaaaggaaatgcatcattgattattctcctgtttgatttctctatcgatgcggcacctctcttaagaagtgtaaccgataataatgttattatatctagacaccagcgtctacatgacgagcttccgagttccaattggttcaagttttacataagtataaagtccgactattgttctatattatatatggttgttgatggatctgtgatgcatgcgatagctgataatagaactcacgcaattattagcaaaaatatattagacaatactacgattaacgatgagtgtagatgctgttattttgaaccacagattaggattcttgatagagatgagatgctcaatggatcatcgtgtgatatgaacagacattgtattatgatgaatttacctgatgtaggcgaatttggatctagtatgttggggaaatatgaacctgacatgattaagattgctctttcggtggctggtaatttaataagaaatcgagactacattcccgggagacgaggatatagctactacgtttacggtatagcctctagataatttttttaagcacgaaataaaaaacataattttaaaccaatctatttcatactattttgtgtgatcaccatggacataaagatagatattagtatttctggtgataaatttacggtgactactaggagggaaaatgaagaaagaaaaaaatatctacctctccaaaaagaaaaaactactgatgttatcaaacctgattatcttgagtacgatgacttgttagatagagatgagatgtttactattctagaggaatattttatgtacagaggtctattaggcctcagaataaaatatggacgactctttaacgaaattaaaaaattcgacaatgatgcggaagaacaattcggtactatagaagaactcaagcagaaacttagattaaattctgaagagggagcagataactttatagattatataaaggtacaaaaacaggatatcgtcaaacttactgtatacgattgcatatctatgataggattgtgtgcatgcgtggtagatgtttggagaaatgagaaactgttttctagatggaaatattgtttacgagcgattaaactgtttattgatgatcacatgcttgataagataaaatctatactgcagaatagactagtatatgtggaaatgtcatagaaagttaaaagttaatgagagcaaaaatatataaggttgtattccatatttgttatttttttctgtaatagttagaaaaatacattcgatggtctatctatcagattattatgtgttataaggtactttttctcataataaactagagtatgagtaagatagtgtttttcaaaacatataaatctaaaattgatggatgagatatacagctattaatttcgaaaatatattttaatctgataactttaaacatggatttttaatggtggtttaacgttttaaaaaaagattttgttattgtagtatatgataatattaaaagatggatataaagaatttgctgactgcatgtactattttttacattactacattggctacggcagatatacctacttcgtcactgccacacgctccggtaaacggggcatgtgacgagggagaatatcttgataagaggcataatcaatgttgtaatcagtgtccacctggagaatttgccaaggttagatgtaatggtaacgataacacaaaatgtgaacgctgcccacctcatacatataccgcaatccccaattactctaatggatgtcatcaatgtagaaaatgcccaacaggatcatttgataaggtaaagtgtaccggaacacagaacagtaaatgttcgtgtcttcctggttggtattgcgctactgattcttcacagactgaagattgtcgagattgtataccaaaaaggagatgtccatgcggatactttggtggaatagatgaacaaggaaatcctatttgtaaatcgtgttgtgttggtgaatattgcgactacctacgtaattatagacttgatccatttcctccatgcaaactatctaaatgtaattaattatgattttgatgataatgttaccatacattatatcgctacttggttagtgtattattcagtatgaagacctattaataattacttatcttttgacgatcttgttataattataatataaaaatacttatggcatagtaactcataattgctgacgcgataaattcgtaataatctgttttgttcaaatttttataaggaatctacaggcataaaaataaaaatataatttataatatactcttacagcgcgccatcatgaataacagcagtgaattgattgctgttattaatggatttagaaatagtggacgattttgtgatattaatatagttattaatgatgaaaggataaacgctcacagactcatcctatctggagcctccgaatatttttccattctgttttccaataattttatcgattctaatgaatacgaagttaatctaagtcatttagattatcaaagtgttaacgatttgatcgattacatttatgggatacctttgagcctaactaacgataacgtgaaatatattctttcaaccgctgattttttacaaattggatctgctattacggagtgtgaaaattacatacttaaaaatctttgttctagaaactgtatcgatttctacatatacgctgataaatataataacaagaaaatagaatcagcgtcgtttaacacaatattacaaaatattttgagactcatcaacgatgaaaactttaaatacttaacagaggaatcaatgataaaaattttaagcgatgatatgttaaatataaaaaatgaggatttcgccccactaattctcattaaatggttagagagtactcaacaaccatgcaccgtcgagttacttaaatgcctcagaatatcattgctttccccacaagttataaaatcactttatagtcatcgactggttagttcaatctacgaatgtataacattcttaaacaatatagcattcttggatgaatcatttcctagataccatagcatcgagttgatatctatcggtataagtaattcgcatgataagatttccataaactgctacaatcataaaaaaaatacatgggaaatgatatcttcacgtagatataggtgtagtttcgcagtggccgtcctggataatattatctatatgatgggtggatatgatcagtccccgtatagaagttcaaaggttatagcgtacaatacatgtacaaattcttggatatatgatataccagagctaaaatatcctcgttctaattgtgggggactggctgatgacgaatacatttattgtataggcggcatacgcgatcaggattcatcgttgacatctagtattgatagatggaagccatcaaaaccatattggcagaagtatgctaaaatgcgcgaaccaaaatgtgatatgggggttgcgatgttaaacggattaatatatgttataggtggaatcgttaaaggtgacacgtgtaccgacgcactagagagtttatcagaagatggatggatgaagcatcaacgtcttccaataaaaatgtccaatatgtcgacgattgttcatgatggcaagatttatatatctggaggttacaacaatagtagtgtagttaatgtaatatcgaatctagtccttagctataattcgatatatgatgaatggaccaaattatcatcattaaacattcctagaattaatcccgctctatggtcagcgcataataaattatatgtaggaggaggaatatctgatgatgttcgaactaatacatctgagacatacgacaaagaaaaagattgttggacattggataatggtcacgtgttaccacgcaattatataatgtataaatgcgaaccgattaaacataaatatccattggaaaaaacacagtacacgaatgattttctaaagtatttggaaagttttataggtagttgatagaacaaaatacataattttgtaaaaataaatcactttttatactaatatgacacgattaccaatacttttgttactaatatcattagtatacgctacaccttttcctcagacatctaaaaaaataggtgatgatgcaactctatcatgtaatcgaaataatacaaatgactacgttgttatgagtgcttggtataaggagcccaattccattattcttttagctgctaaaagcgacgtcttgtattttgataattataccaaggataaaatatcttacgactctccatacgatgatctagttacaactatcacaattaaatcattgactgctagagatgccggtacttatgtatgtgcattctttatgacatcaactacaaatgacactgataaagtagattatgaagaatactccacagagttgattgtaaatacagatagtgaatcgactatagacataatactatctggatctacacattcaccggaaactagttctaagaaacctgattatatagataattctaattgctcgtcggtattcgaaatcggtacccggggatcagcttgcatgcctgcagcaattcccgaggctgtagccgacgatggtgcgccaggagagttgttgattcattgtttgcctccctgctgcggtttttcaccgaagttcatgccagtccagcgtttttgcagcagaaaagccgccgacttcggtttgcggtcgcgagtgaagatccctttcttgttaccgccaacgcgcaatatgccttgcgaggtcgcaaaatcggcgaaattccatacctgttcaccgacgacggcgctgacgcgatcaaagacgcggtgatacatatccagccatgcacactgatactcttcactccacatgtcggtgtacattgagtgcagcccggctaacgtatccacgccgtattcggtgatgataatcggctgatgcagtttctcctgccaggccagaagttctttttccagtaccttctctgccgtttccaaatcgccgctttggacataccatccgtaataacggttcaggcacagcacatcaaagagatcgctgatggtatcggtgtgagcgtcgcagaacattacattgacgcaggtgatcggacgcgtcgggtcgagtttacgcgttgcttccgccagtggcgcgaaatattcccgtgcaccttgcggacgggtatccggttcgttggcaatactccacatcaccacgcttgggtggtttttgtcacgcgctatcagctctttaatcgcctgtaagtgcgcttgctgagtttccccgttgactgcctcttcgctgtacagttctttcggcttgttgcccgcttcgaaaccaatgcctaaagagaggttaaagccgacagcagcagtttcatcaatcaccacgatgccatgttcatctgcccagtcgagcatctcttcagcgtaagggtaatgcgaggtacggtaggagttggccccaatccagtccattaatgcgtggtcgtgcaccatcagcacgttatcgaatcctttgccacgcaagtccgcatcttcatgacgaccaaagccagtaaagtagaacggtttgtggttaatcaggaactgttcgcccttcactgccactgaccggatgccgacgcgaagcgggtagatatcacactctgtctggcttttggctgtgacgcacagttcatagagataaccttcacccggttgccagaggtgcggattcaccacttgcaaagtcccgctagtgccttgtccagttgcaaccacctgttgatccgcatcacgcagttcaacgctgacatcaccattggccaccacctgccagtcaacagacgcgtggttacagtcttgcgcgacatgcgtcaccacggtgatatcgtccacccaggtgttcggcgtggtgtagagcattacgctgcgatggattccggcatagttaaagaaatcatggaagtaagactgctttttcttgccgttttcgtcggtaatcaccattcccggcgggatagtctgccagttcagttcgttgttcacacaaacggtgatacgtacacttttcccggcaataacatacggcgtgacatcggcttcaaatggcgtatagccgccctgatgctccatcacttcctgattattgacccacactttgccgtaatgagtgaccgcatcgaaacgcagcacgatacgctggcctgcccaacctttcggtataaagacttcgcgctgataccagacgttgcccgcataattacgaatatctgcatcggcgaactgatcgttaaaactgcctggcacagcaattgcccggctttcttgtaacgcgctttcccaccaacgctgatcaattccacagttttcgcgatccagactgaatgcccacaggccgtcgagttttttgatttcacgggttggggtttctacaggacgtaacattctagtcgaggaattcatttatagcatagaaaaaaacaaaatgaaattctactatatttttacatacatatattctaaatatgaaagtggtgattgtgactagcgtagcatcgcttctagacatctatatactatatagtaataccaatactcaagactacgaaactgatacaatctcttatcatgtgggtaatgttctcgatgtcgatagccatatgcccggtagttgcgatatacataaactgatcactaattccaaacccacccgctttttatagtaagtttttcacccataaataataaatacaataattaatttctcgtaaaagtagaaaatatattctaatttattgcacggtaaggaagtagaatcataaagaacagtgacggatccccgatccccgacctgcaggcatgcaagctcgactccggaaccaattactgataatgtagaagatcatacagacaccgtcacatacactagtgatagcattaatacagtaagtgcatcatctggagaatccacaacagacgagactccggaaccaattactgataaagaagatcatacagttacagacactgtctcatacactacagtaagtacatcatctggaattgtcactactaaatcaaccaccgatgatgcggatctttatgatacgtacaatgataatgatacagtaccaccaactactgtaggcggtagtacaacctctattagcaattataaaaccaaggactttgtagaaatatttggtattaccgcattaattatattgtcggccgtggcaattttctgtattacatattatatatataataaacgttcacgtaaatacaaaacagagaacaaagtctagatttttgacttacataaatgtctgggatagtaaaatctatcatattgagcggaccatctggtttaggaaagacagccatagccaaaagactatgggaatatatttggatttgtggtgtcccataccactagatttcctcgtcctatggaacgagaaggtgttgattaccattacgttaacagagaggccatctggaagggaatagccgccggaaactttctagaacatactgagtttttaggaaatatttacggaacttctaaaacagctgtgaatacagcggctattaataatcgtatttgtgtgatggatctaaacatcgacggtgttagaagtcttaaaaatacgtacctaatgccttactcggtgtatataagacctacctctcttaaaatggttgagaccaagcttcgtcgtagaaacactgaagctaacgatgagattcatcgtcgtgtgatgttggcaaaaactgacatggatgaggcaggtgaagccggtctattcgacactattatcattgaagatgatgtgaatttagcatatagtaagttaattcagatactacaggaccgtattagaatgtattttaacactaattagagacttaagacttaaaacttgataattaataatataactcgtttttatatgtgtctatttcaacgtctaatgtattagttaaatattaaaacttaccacgtaaaacttaaaatttaaaatgatatttcattgacagatagatcacacattatgaactttcaaggacttgtgttaactgacaattgcaaaaatcaatgggtcgttggaccattaataggaaaaggtggattcggtagtatttatactactaatgacaataattatgtagtaaaaatagagcccaaagctaacggatcattatttaccgaacaggcattttatactagagtacttaaaccatccgttatcgaagaatggaaaaaatctcacaatataaagcacgtaggtcttatcacgtgcaaggcatttggtctatacaaatccattaatgtggaatatcgattcttggtaattaatagattaggtgcagatctagatgcggtgatcagagccaataataatagactaccaaaaaggtcggtgatgttgatcggaatcgaaatcttaaataccatacaatttatgcacgagcaaggatattctcacggagatattaaagcgagtaatatagtcttagatcaaatagataagaataaattatatctagtggattacggattggtttctaaattcatgtctaatggcgaacatgttccatttataagaaatccaaataaaatggataacggtactctagaatttacacctatagattcgcataaaggatacgttgtatctagacgtggagatctagaaacacttggatattgtatgattagatggttgggaggtatcttaccatggactaagatatctgaaacaaagaattgtgcattagtaagtgccacaaaacagaaatatgttaacaatactgcgactttgttaatgaccagtttgcaatatgcacctagagaattgctgcaatatattaccatggtaaactctttgacatattttgaggaacccaattacgacaagtttcggcacatattaatgcagggtgtatattattaagtgtggtgtttggtcgataaaaattaaaaaataacttaatttattattgatctcgtgtgtacaaccgaaatcatggcgatgttttacgcacacgctctcggtgggtacgacgagaatcttcatgcctttcctggaatatcatcgactgttgccaatgatgtcaggaaatattctgttgtgtcagtttataataacaagtatgacattgtaaaagacaaatatatgtggtgttacagtcaggtgaacaagagatatattggagcactgctgcctatgtttgagtgcaatgaatatctacaaattggaaatccgatccatgatcaagaaggaaatcaaatctctatcatcacatatcgccacaaaaactactatgctctaagcggaatcgggtacgagagtctagacttgtgtttggaaggagtagggattcatcatcacgtacttgaaacaggaaacgctgtatatggaaaagttcaacatgattattctactatcaaagagaaggccaaagaaatgagtgcacttagtccaggacctatcatcgattaccacgtctggataggagattgtatctgtcaagttactgctgtggacgtacatggaaaggaaattatgaaaatgagattcaaaaagggtgcggtgcttccgatcccaaatctggtaaaagttaaacttggggagaatgatacagaaaatctttcttctactatatcggcggcaccatcgaggtaaccacctctctggaagacagcgtgaatcatgtactcatgaaacgtttggaaactatacgccatatgtggtctgttgtatatgatcattttgatattgtgaatggtaaagaatgctgttatgtgcatacgcattcatctaatcaaaatcctataccgagtactgtaaaaacaaatttgtacatgaagactatgggatcatgcattcaaatggattccatggaagctctagagtatcttagcgaactgaaggaatcaggtggatggagtcccagaccagaaatgcaggaatttgaatatccagatggagtggaagacactgaatcaattgagagattggcagaggagttcttcaatagatcagaacttcaggctggtgaatcagtcaaatttggtaattctattaattgttaaacatacatctgtttcagctaagcaactaagaacacgtatacggcagcagcttccttctatactctcatcttttaccaacacaaagggtggatatttgttcattggagttgataataatacacacaaagtatttggattcacggtgggttacgactacctcagactgatagagaatgatatagaaaagcatatcaaaagacttcgtgttgtgcatttctgtgagaagaaagaggacatcaagtacgcgtgtcgattcatcaaggtatataaacctggggatgagactacctcgacatacgtgtgcgctatcaaagtggaaagatgctgttgtgctgtgtttgcagattggccagaatcatggtatatggatactaatggtatcaagaagtattctccagatgaatgggtgtcacatataaaattttaattaatgtaactatagagaacaaataataaggttgtaatatcatatagacaataactaacaattaattagtaactgttatctcttttttaactaaccaactaactatatacctattaatacatcgtaattatagttcttaacatctattaatcattaattcgcttctttaattttttataaactaacattgttaattgaaaagggataacatgttacagaatataaattatatatggatttttttaaaaaggaaatacttgactggagtatatatttatctcttcattatatagcacgcgtgttttccaatttttccacatcccatataatacaggattataatctcgttcgaacatacgagaaagtggataaaacaatagttgattttttatctaggttgccaaatttattccatattttagaatatggggaaaatattctacatatttattctatggatgatgctaatacgaatattataattttttttctagatagagtattaaatattaataagaacgggtcatttatacacaatctcgggttatcatcatccattaatataaaagaatatgtatatcaattagttaataatgatcatccagataataggataagactaatgcttgaaaatggacgtagaacaagacattttttgtcctatatatcagatacagttaatatctatatatgtattttaataaatcatggattttatatagatgccgaagacagttacggttgtacattattacatagatgtatatatcactataagaaatcagaatcagaatcatacaatgaattaattaagatattgttaaataatggatcagatgtagataaaaaagatacgtacggaaacacaccttttatcctattatgtaaacacgatatcaacaacgtggaattgtttgagatatgtttagagaatgctaatatagactctgtagactttaatagatatacacctcttcattatgtctcatgtcgtaataaatatgattttgtaaagttattaatttctaaaggagcaaatgttaatgcgcgtaataaattcggaactactccattttattgtggaattatacacggtatctcgcttataaaactatatttggaatcagacacagagttagaaatagataatgaacatatagttcgtcatttaataatttttgatgctgttgaatctttagattatctattatccagaggagttattgatattaactatcgtactatatacaacgaaacatctatttacgacgctgtcagttataatgcgtataatacgttggtctatctattaaacaaaaatggtgattttgagacgattactactagtggatgtacatgtatttcggaagcagtcgcaaacaacaacaaaataataatggaagtactattgtctaaacgaccatctttgaaaattatgatacagtctatgatagcaattactaaacataaacagcataatgcagatttattgaaaatgtgtataaaatatactgcgtgtatgaccgattatgatactcttatagatgtacagtcgctacagcaatataaatggtatattttaagatgtttcgatgaaatagatatcatgaagagatgttatataaaaaataaaactgtattccaattagttttttgtatcaaagacattaatactttaatgagatacggtaaacatccttctttcgtgaaatgcactagtctcgacgtatacggaagtcgtgtacgtaatatcatagcatctattagatatcgtcagagattaattagtctattatccaagaagctggatcctggagataaatggtcgtgttttcctaacgaaataaaatataaaatattggaaaactttaacgataacgaactatccacatatctaaaaatcttataaacattattaaaatataaaatctaagtaggataaaatcacactacatcattgtttccttttagtgctcgacagtgtatactatttttaacgctcataaataaaaatgaaaacgatttccgttgttacgttgttatgcgtactacctgctgttgtttattcaacatgtactgtacccactatgaataacgctaaattaacgtctaccgaaacatcgtttaatgataaccagaaagttacgtttacatgtgatcagggatatcattctttggatccaaatgctgtctgtgaaacagataaatggaaatacgaaaatccatgcaaaaaaatgtgcacagtttctgattatgtctctgaactatataataaaccgctatacgaagtgaattccaccatgacactaagttgcaacggcgaaacaaaatattttcgttgcgaagaaaaaaatggaaatacttcttggaatgatactgttacgtgtcctaatgcggaatgtcaacctcttcaattagaacacggatcgtgtcaaccagttaaagaaaaatactcatttggggaatatatgactatcaactgtgatgttggatatgaggttattggtgcttcgtacataagttgtacagctaattcttggaatgttattccatcatgtcaacaaaaatgtgatatgccgtctctatctaacggattaatttccggatctacattttctatcggtggcgttatacatcttagttgtaaaagtggttttacactaacggggtctccatcatccacatgtatcgacggtaaatggaatcccatactcccaatatgtgtacgaactaacgaaaaatttgatccagtggatgatggtcccgacgatgagacagatttgagcaaactctcgaaagacgttgtacaatatgaacaagaaatagaatcgttagaagcaacttatcatataatcatagtggcgttgacaattatgggcgtcatatttttaatctccgttatagtattagtttgttcctgtgacaaaaataatgaccaatataagttccataaattgctaccgtaaatataaatccgttaaaataattaataatttaataacaaacaagtatcaaaagattaaagacttatagctagaatcaattgagatgtcttcttcagtggatgttgatatctacgatgccgttagagcatttttactcaggcactattataacaagagatttattgtgtatggaagaagtaacgccatattacataatatatacaggctatttacaagatgcgccgttataccgttcgatgatatagtacgtactatgccaaatgaatcacgtgttaaacaatgggtgatggatacacttaatggtataatgatgaatgaacgcgatgtttctgtaagcgttggcaccggaatactattcatggaaatgtttttcgattacaataaaaatagtatcaacaatcaactaatgtatgatataattaatagcgtatctataattctagctaatgagagatatagaagcgcttttaacgacgatggtatatacatccgtagaaatatgattaacaagttgtacggatacgcatctctaactactattggcacgatcgctggaggtgtttgttattatctgttgatgcatctagttagtttgtataaataattatttcaatatactagttaaaattttaagattttaaatgtataaaaaactaataacgtttttatttgtaataggtgcattagcatcctattcgaataatgagtacactccgtttaataaactgagtgtaaaactctatatagatggagtagataatatagaaaattcatatactgatgataataatgaattggtgttaaattttaaagagtacacaatttctattattacagagtcatgcgacgtcggatttgattccatagatatagatgttataaacgactataaaattattgatatgtataccattgactcgtctactattcaacgcagaggtcacacgtgtagaatatctaccaaattatcatgccattatgataagtacccttatattcacaaatatgatggtgatgagcgacaatattctattactgcagagggaaaatgctataaaggaataaaatatgaaataagtatgatcaacgatgatactctattgagaaaacatactcttaaaattggatctacttatatatttgatcgtcatggacatagtaatacatattattcaaaatatgatttttaaaaatttaaaatatattatcacttcagtgacagtagtcaaataacaaacaacaccatgagatatattataattctcgcagttttgttcattaatagtatacatgctaaaataactagttataagtttgaatccgtcaattttgattccaaaattgaatggactggggatggtctatacaatatatcccttaaaaattatggcatcaagacgtggcaaacaatgtatacaaatgtaccagaaggaacatacgacatatccgcatttccaaagaatgatttcgtatctttctgggttaaatttgaacaaggcgattataaagtggaagagtattgtacgggactatgcgtcgaagtaaaaattggaccaccgactgtaacattgactgaatacgacgaccatatcaatttgtacatcgagcatccgtatgctactagaggtagcaaaaagattcctatttacaaacgcggtgacatgtgtgatatctacttgttgtatacggctaacttcacattcggagattctaaagaaccagtaccatatgatatcgatgactacgattgcacgtctacaggttgcagcatagactttgtcacaacagaaaaagtgtgcgtgacagcacagggagccacagaagggtttctcgaaaaaattactccatggagttcgaaagtatgtctgacacctaaaaagagtgtatatacatgcgcaattagatccaaagaagatgttcccaatttcaaggacaaaatggccagagttatcaagagaaaatttaatacacagtctcaatcttatttaactaaatttctcggtagcacatcaaatgatgttaccacttttcttagcatgcttaacttgactaaatattcataactaatttttattaatgatacaaaaacgaaataaaactgcatattatacactggttaacgcccttataggctctaaccattttcaagatgaggtccctgattatagtccttctgttcccctctatcatctactccatgtctattagacgatgtgagaagactgaagaggaaacatggggattgaaaatagggttgtgtataattgccaaagatttctatcccgaaagaactgattgcagtgttcatctcccaactgcaagtgaaggattgataactgaaggcaatggattcagggatatacgaaacaccgataaattataaaaaaagcaatgtgtccgctgtttccgttaataatactattttcgtaactggcggattattcataaataactctaatagcacgatcgtggttaacaatatggaaaaacttgacatttataaagacaaacaatggtcgattatagaaatgcctatggctagggtatatcacggcattgactcgacatttggaatgttatattttgccggaggtctatccgttaccgaacaatatggtaatttagagaaaaacaacgagatatcttgttacaatcctagaacgaataagtggtttgatatttcatatactatttataagatatccatatcatcattgtgtaaactaaataacgtcttctatgtatttagtaaggacattggatatgtggaaaagtatgatggtgcatggaagttagtacatgatcgtctccccgctataaaggcattatcaacttctccttattgattgaaaatgaaaatataaatagtttttatgtatagcagtattaccctatagttttattgcttactactaacatggatacagatgttacaaatgtagaagatatcataaatgaaatagatagagagaaagaagaaatactaaaaaatgtagaaattgaaaataataaaaacattaacaagaatcatcccaatgaatatattagagaagcactcgttattaataccagtagtaatagtgattccattgataaagaagttatagaatgtatcagtcacgatgtaggaatatagatcatatctactaatttttataatcgatacaaaacataaaaaacaactcgttattacatagcaggcatggaatccttcaagtattgttttgataacgatggcaagaaatggattatcggaaatactttatattctggtaattcaatactctataaggtcagaaaaaatttcactagttcgttctacaattacgtaatgaagatagatcacaaatcacacaagccattgttgtctgaaatacgattctatatatctgtattggatcctttgactatcgacaactggacacgggaacgtggtataaagtatttggctattccagatctgtatggaattggagaaaccgatgattatatgttcttcgttataaagaattcgggaagagtattcgccccaaaggatactgaatcagtcttcgaagcatgcgtcactatgataaacacgttagagtttatacactctcgaggatttacccatggaaaaatagaaccgaggaatatactgattagaaataaacgtctttcactaattgactattctagaactaacaaactatacaagagtggaaactcacatatagattacaacgaggacatgataacttcaggaaatatcaattatatgtgtgtagacaatcatcttggagcaacagtttcaagacgaggagatttagaaatgttgggatattgcatgatagaatggttcggtggcaaacttccatggaaaaacgaaagtagtataaaagtaataaaacaaaaaaaagaatataaaaaatttatagctactttctttgaggactgttttcctgaaggaaatgaacctctggaattagttagatatatagaattagtatacacgttagattattctcaaactcctaattatgacagactacgtaaactgtttatacaagattgaaattatattcttttttttatagagtgtggtagtgttacggatatctaatattaatattagactatctctatcgcgctacacgaccaatatcgattactatggatatcttctatgaaaggagagaatgtatttatttctccagcgtcaatctcgtcagtattgacaatactgtattatggagctaatggatccactgctgaacagctatcaaaatatgtagaaacggaggagaacacggataaggttagcgctcagaatatctcattcaaatccatgaataaagtatatgggcgatattctgccgtgtttaaagattcctttttgagaaaaattggcgataagtttcaaactgttgacttcactgattgtcgcactatagatgcaatcaacaagtgtgtagatatctttactgaggggaaaatcaatccactattggatgaaccattgtctcctagcaattagtgccgtatactttaaagcaaaatggttgacgccattcgaaaaggaatttaccagtgattatcccttttacgtatctccgacggaaatggtagacgtaagtatgatgtctatgtacggcaaggcatttaatcacgcatctgtaaaagaatcattcggcaacttttcaatcatagaactgccatatgttggagatactagtatgatggtcattcttccagacaagattgatggattagaatccatagaacaaaatctaacagatacaaattttaagaaatggtgtgactttatggatgctatgtttatagatgttcacattcccaagtttaaggtaacaggctcgtataatctggtggatactctagtaaagtcaggactgacagaggtgttcggttcaactggagattatagcaatatgtgtaatttagatgtgagtgtcgacgctatgatccacaaaacgtatatagatgtcaatgaagagtatacagaagcagctgcagcaacttctgtactagtggcagactgtgcatcaacaattacaaatgagttctgtgcagatcatccgttcatctatgtgattaggcatgttgatggaaaaattcttttcgttggtagatattgctctccgacaactaattgttaaccattttttttaaaaaaaatagaaaaaacatgtggtattagtgcaggtcgttgttcttccaattgcaattggtaagatgacggccaactttagtacccacgtcttttcaccacagcactgtggatgtgacagactgaccagtattgatgacgtcaaacaatgtttgactgaatatatttattggtcgtcctatgcataccgcaacaggcaatgcgctggacaattgtattccacactcctctcttttagagatgatgcggaattagtgttcatcgacattcgcgagctggtaaaaaatatgccgtgggatgatgtcaaagattgtacagaaatcatccgttgttatataccggatgagcaaaaaaccatcagagagatttcggccatcatcggactttgtgcatatgctgctacttactggggaggtgaagaccatcccactagtaacagtctgaacgcattgtttgtgatgcttgagatgctaaattacgtggattataacatcatattccggcgtatgaattgatgagttgtacatcttgacattttctttcttctcttctccctttcttctcttctcccttcctccctcttctccctttcccagaaacaaacttttttacccactataaaataaaatgagtatactacctattatatttcttcctatatttttttattcttcattcgttcagacttttaacgcgtctgaatgtatcgacaaagggcaatattttgcatcattcatggagttagaaaacgagccagtaatcttaccatgtcctcaaataaatacgctatcatccggatataatatattagatattttatgggaaaaacgaggagcggataatgatagaattataccgatagataatggtagcaatatgctaattctgaacccgacacaatcagactctggtatttatatatgcattaccacgaacgaaacctactgtgacatgatgtcgttaaatttgacaatcgtgtctgtctcagaatcaaatatagatcttatctcgtatccacaaatagtaaatgagagatctactggcgaaatggtatgtcccaatattaatgcatttattgctagtaacgtaaacgcagatattatatggagcggacatcgacgccttagaaataagagacttaaacaacggacacctggaattattaccatagaagatgttagaaaaaatgatgctggttattatacatgtgttttagaatatatatacggtggcaaaacatataacgtaaccagaattgtaaaattagaggtacgggatagaataataccttctactatgcaattaccagatggcattgtaacttcaataggtagtaatttgactattgcatgcagagtatcgttgagacctcccacaacggacaccgacgtcttttggataagtaatggtatgtattacgaagaagatgatggggacggaaacggtagaataagtgtagcaaataaaatctatatgaccgataagagacgtgttattacatcccggttaaacattaatcctgtcaaggaagaagatgctacaacgtttacgtgtatggcgtttactattcctagcatcagcaaaacagttactgttagtataacgtgaatgtatgttgttacatttccatgtcaattgagtttataagaatttttatacattatcttccaacaaacaattgacgaacgtattgctatgattaactcccacgatactatgcatattattaatcattaacttgcagactatacctagtgctattttgacatactcgtgttcttgtgtaattgcggtatctatattattaaagtacgtaaatctagctatagttttattatttaattttagataatataccgtctccttatttttaaaaattgccacatcctttattaaatcatgaatgggaatttctatgtcatcgttagtatattgtgaacaacaagagcagatatctataggaaagggtggaatgcgatacattgatctatgtagttttaaaacacacgcgaactttgaagaatttatataaatcattccatcgatacatccttctatgttgacatgtatatatccaggaattcttttattaatgtcaggaaatgtataaactaaaacattgcccgaaagcggtgcctctatctgcgttatatccgttcttaacttacaaaatgtaaccaatacctttgcatgacttgttttgttcggcaacgttagtttaaacttgacgaatggattaattacaatagcatgatccgcgcatctattaagtttttttactttaacgcccttgtatgtttttacagagactttatctaaatttctagtgcttgtatgtgttataaatataacgggatatagaaccgaatcacctaccttagatacccaattacattttatcagatccagataataaacaaattttgtcgccctaactaattctatattgttatatattttacaattggttatgatatcatgtaataacttggagtctaacgcgcatcgtcgtacgtttatacaattgtgatttagtgtagtatatctacacatgtatttttccgcactatagtattctggactagtgataaaactatcgttatatctgtcttcaatgaactcatcgagatattgctctctgtcatattcatacacctgcataaactttctagacatcttacaatccgtgttattttaggatcatatttacatatttacgggtatatcaaagatgttagattagttaatgggaatcgtctataataatgaatattaaacaattatatgaggacttttaccacaaagcatcataaaaatgagtcgtcgtctgatttatgttttaaatatcaaccgcaaatcaactcataaaatacaagagaatgaaatatatacatattttagtcattgcaatatagaccatacttctacagaacttgattttgtagttaaaaactatgatctaaacagacgacaacctgtaactgggtatactgcactacactgctatttgtataataattactttacaaacgatgtactgaagatattattaaatcatgacgtaaatgtaacgatgaaaaccagtagcggacgtatgcctgtttatatattgcttactagatgttgtaatatttcacatgatgtagtgatagatatgatagacaaagataaaaaccacttattacatagagactattccaacctattactagagtatataaaatctcgttacatgttattgaaggaagaggatatcgatgagaacatagtatccactttattagataagggaatcgatcctaactttaaacaagacggatatacagcgttacattattattatttgtgtctcgcacacgtttataaactaggtgagtgtagaaaaccgataacgataaaaaaggccaagcgaattatttctttgtttatacaacatggagctaatctaaacgcgttagataattgtggtaatacaccattccatttgtatcttagtattgaaatgtgtaataatattcatatgactaaaatgctgttgacttttaatccgaatttcaaaatatgtaataatcatggattaacgcctatactatgttatataacttccgactacatacaacacgatattcttgttatgttaatacatcactatgaaacaaatgttggagaaatgccgatagatgagcgtcgtatgatcgtattcgagtttatcaaaacatattctacacgtccggcagattcgataacttatttgatgaataggtttaaaaatataaatatttatacccgctatgaaggaaagacattattacacgtagcatgtgaatataataatacacaagtaatagattatcttatacgtatcaacggagatataaatgcgttaaccgacaataacaaacacgctacacaactcattatagataacaaagaaaattccccatataccattaattgtttactgtatatacttagatatattgtagataagaatgtgataagatcgttggtggatcaacttccatctctacctatcttcgatataaaatcatttgagaaattcatatcctactgtatacttttagatgacacattttacgataggcacgttaagaatcgcgattctaaaacgtatcgatacgcattttcaaaatacatgtcgtttgataaatacgatggtataataactaaatgtcacgacgaaacaatgttactcaaactgtccactgttctagacactacactatatgcagttttaagatgtcataattcgagaaagttaagaagatacctcaacgagttaaaaaaatataataacgataagtcctttaaaatatattctaatattatgaatgagagataccttaatgtatattataaagatatgtacgtgtcaaaggtatatgataaactatttcctgttttcacagataaaaattgtctactaacattactaccttcagaaattatatacgaaatattatacatgctgacaattaacgatctttataatatatcgtatccacctaccaaagtatagttgtatttttctcatgcgatgtgtgtaaaaaaactgatattatataaatattttagtgccgtataataaagatgacgatgaaaatgatggtacatatatatttcgtatcattattgttattgctattccacagttacgccatagacatcgaaaatgaaatcacagaattcttcaataaaatgagagatactctaccagctaaagactctaaatggttgaatccagcatgtatgttcggaggcacaatgaatgatatagccgctctaggagagccattcagcgcaaagtgtcctcctattgaagacagtcttttatcgcacagatataaagactatgtggttaaatgggagaggctagaaaagaatagacggcgacaggtttctaataaacgtgttaaacatggtgatttatggatagccaactatacatctaaattcagtaaccgtaggtatttgtgcaccgtaactacaaagaatggtgactgtgttcagggtatagttagatctcatattaaaaaacctccttcatgcattccaaaaacatatgaactaggtactcatgataagtatggcatagacttatactgtggaattctttacgcaaaacattataataatataacttggtataaagataataaggaaattaatatcgacgacattaagtattcacaaacgggaaaggaattaattattcataatccagagttagaagatagcggaagatacgactgttacgttcattacgacgacgttagaatcaagaatgatatcgtagtatcaagatgtaaaatacttacggttataccgtcacaagaccacaggtttaaactaatactagatccgaaaatcaacgtaacgataggagaacctgccaatataacatgcactgctgtgtcaacgtcattattgatcgacgatgtactgattgaatgggaaaatccatccggatggcttataggattcgattttgatgtatactctgttttaactagtagaggcggtatcaccgaggcgaccttgtactttgaaaatgttactgaagaatatataggtaatacatataaatgtcgtggacacaactattattttgaaaaaacccttacaactacagtagtattggagtaaatatacaatgcatttttatatacattactgaattattattactgaattattattactgaattattattaattatatcgtatttgtgctatagaatggatgaagatacgcgactatctaggtatttgtatctcaccgatagagaacatataaatgtagactctattaaacagttgtgtaaaatatcagatcctaatgcatgttatagatgtggatgtacggctttacatgagtacttttataattatagatcagtcaacggaaaatacaagtatagatacaacggttactatcaatattattcatctagcgattatgaaaattataatgaatattattatgatagaactggtatgaacagtgagagtgataatatatcaatcaaaacagaatatgaattctatgatgaaacacaagatcaaagtacacaactagtaggttacgacattaaactcaaaaccaatgaggatgattttatggctatgatagatcagtgggtgtccatgattatatagatgaatcaattaataaagtagtatatggaagagagtctcacgtaagatggcgggatatatggcaagaacataatgatggcgtatacagtataggaaaggagtgcatagataatatatacgaagacaaccataccgtagacgaattctacaagatagacagcgtatcagatgtagatgacgcggaacacatatctccgataactaaaaaaccatagaatcagttgatgataatacctacatttctaatcttccgtataccatcaaatacaaaatattcgagcaacaataagtattttttatacctttaaaactgataaataaattttttctagtgatattttggcaagatgagaatcctatttctcatcgctttcatgtatgggtgtgttcactcatatgttaacgcggttgaaaccaaatgtccaaatctagacattgtaacatcttctggagaatttcattgttcaggatgtgtggaacatatgcctgagtttagctatatgtattggttggcaaaggatatgaaatcggacgaggataccaagtttatagaacatctgggtgatggcatcaaagaagatgaaaccgttcgtaccacagatagtggaatcgtcactctacgtaaagtccttcatgtgactgatactaataaatttgataattataggttcacttgtgtcctcgctacgctagatggcatttataaaaagaatgtttgctgaagtagttgtgtgctactatttttatttatgatataatctaatggaattaatttgaattgatatttatccaatactaaagattatattagaatcaaattaatcttttatacgagaaaaaataacgacatacgtcgtcaacaaattaaactttttatttattagttaactagcttatagaacttgctcattgttatgtttctaaaacgggtacggcatataggacaattatccgacgcaccggtttctcttcgtgttctatgccatatattgatgcatgttatgcaaaatatatgagtacacgaatccaataaaccaaagtatctatcgttttgagtaaacaacttcatagcaaattccacattctttttctttacttactctatacacgtcctcgtatttatttagtattttgatgatatccaactcagaaatggttgttgtattattgggtgtatttggagtataggtattattagctatgtaccaatttaccaaccctcttaatattgattgataatcacatcggttatccaattaataactaaattgtagtgtatatatagaccatatatgtttctatttttttgacagttacgtatagtttcagtaagttttgattgttgtattcctgtatctctagataagttagtcatatagtcccttccggcgatacgttttttccaagcccgaaattgattagccaaatgtgtatttatttttgtgatattgatataatatttcggataatgcatactgttagtcttatatcatttggttcatctatgtattgtaatattgttacatgatctatagatgatgtattgattttggcaggatcgaattccatatccgcgactaaacagtgaaaaaaatgtaaatactttttaaattttaaattagtaaaacttttttttattttttatgattccaaaaatactgaatacaaagtcctaaattataaatatggagatcatactaccacaacttattattatgtatacaaggccggtgtaatagatagatatatataattctattacaccggcagacaattaccgaccggtatttgtcgttaccaacataccgtataatatgtaatatacaattccataacccattgacagttgttatacatcaaaattgcaattcttttgattacgatgttataagaatgtagttaattgatgtatgatgttaatgtgtcctctttcctcttataacatcgtaatcaaaaacttttttataatatatacctaataatgtgtcttaatagttctcgtgattcgtcaaacaatcattcttataaaatataataaagcaacgtaaaaacacataaaaataagcgtaactaataagacaatggatatttacgacgataaaggtctacagactattaaactgtttaataatgaatttgattgtataaggaatgacatcagagaattatttaaacatgtaactgattccgatagtatacaacttccgatggaagacaattctgatattatagaaaatatcagaaaaatactatatagacgattaaaaaatgtagaatgtgttgacatcgataacacaataacttttatgaaatacgatccaaatgatgataataagcgtacgtgttctaattgggtacccttaactaataactatatggaatattgtctagtaatatatttggaaacaccgatatgtggaggcaaaataaaattataccaccctacaggaaatataaagtcggataaggatattatgtttgcaaagactctagactttaaatcaacgaaagtgttaactggacgtaaaacaattgccgttctagacatatccgtttcatataatagatcaatgactactattcactacaacgacgacgttgatatagatatacatactgataaaaatggaaaagagttatgttattgttatataacaatagatgatcattacttggttgatgtggaaactataggagttatagtcaatagatctggaaaatgtctgttagtaaataaccatctaggtataggtatcgttaaagataaacgtataagcgatagttttggagatgtatgtatggatacaatatttgacttttctgaagcacgagagttattttcattaactaatgatgataacaggaatatagcatgggacactgataaactagacgatgatacagatatatggactcccgtcacagaagatgattacaaatttctttctagactagtattgtatgcaaaatctcaatcggatactgtatttgactattatgttcttactggtgatacggaaccacccactgtattcattttcaaggtaactagattttactttaatatgccgaaataaaaaatttttgtataatatctagaggtagaggtattgtttagataaatacaaataacatagatacatcgcatacttagcatttttataaatatacataagacatacactttatacatttttgtaaaaatactcataaaaaaatttataaaaattatggcacaaccatatcttgtataggtagtttagttcgtcgagtgaacctataaacagataatagacaacacataataatgcctactaatacaagcataataccgggagatgggatatatgacgttgtagtgtttgggttttctgaacgttgatagtctactaatactacatgctgacatctaatgcctgtataaccatgagagcatctacaatacataccgtcaatatctctagcgtggatacagtcaccgtgtaaacaatatccatctccctctggaccgcataatctgatagctggaatatctgttgtagcgtttgtaatttctggcaatgtcgtttcgatagcgttaccactatcggcgaatgatctgattatcatagcagcgaacaacaacatcagataatttatcaacatttttgatggattctgtgtttatgctgtttctcagtgtgtgtttatgacaagattgggaattttatattattaattcagtaatataaactaataatatattgttaattgtgtaaataatataaaaataacaatacaatattgaatgtgttgctgttaaaaatgtatgtgttaatataatagaataaaataaatgagtatgatcattttagataacgattgattttatcattaccgcttcattcttatattctttgcttacggaacctatatttagaaacatctactaacaattttttatgcttgcattattaatggtatgtaatatgattgattgtgtacgcaataccaatttgttaagtatgaatacggggtacaaacataaattgaaatttaacattatttatttatgatatatatcgttatcgttaggtctataccatggatatctttaaagaactaatcttaaaacaccctgatgaaaatgttttgatttctccagtttccattttatctactttatctattctaaatcatggagcagctggttctacagctgaacaactatcaaaatatatagagaatatgaatgagaatacacccgatgacaataatgatgacatggaggtagatattccgtattgtgcgacactagctaccgcaaataaaatatacggtagcgatagtatcgagttccacgcctccttcctacaaaaaataaaagacgattttcaaactgtaaactttaataatgctaaccaaacaaaggaactaatcaacgaatgggttaagacaatgacaaatggtaaaattaattccttattgactagtccgctatccattaatactcgtatgacagttgttagcgccgtccattttaaagcaatgtggaaatatccattttctaaacatcttacatatacagacaagttttatatttctaagaatatagttaccagcgttgatatgatggtgggtaccgagaataacttgcaatatgtacatattaatgaattattcggaggattctctattatcgatattccatacgagggaaactctagtatggtaattatactaccggacgacatagaaggtatatataacatagaaaaaaatataacagatgaaaaatttaaaaaatggtgtggtatgttatctactaaaagtatagacttgtatatgccaaagtttaaagtggaaatgacagaaccgtataatctggtaccgattttagaaaatttaggacttactaatatattcggatattatgcagattttagcaagatgtgtaatgaaactatcactgtagaaaaatttctacatacgacgtttatagatgttaatgaggagtatacagaagcatcggccgttacaggagtatttacgattaacttttcgatggtatatcgtacgaaggtctacataaaccatccattcatgtacatgattaaagacaccacaggacgtatactttttatagggaaatactgctatccgcaataaatataaacaaatagacttttataaagagtcttcaacgataagtatatcgacatactacttatgctgcgaaagattctgaacgagaacgactatctcaccctcttggatcatatccgcactgctaaatactaaatctccactacactttttatcatcttatgaggaatgattgccttcgtgaaataggaataattagcaccagaatagctatggattattgtggtagagagtgcactattctatgtcgtctactggatgaagatgtgacgtacaaaaaaataaaactagaaattgaaacgtgtcacaacttatcaaaacatatagatagacgaggaaacaatgcgctacattgttacgtctccaataaatgcgatacagacattaagattgttctctcgcggagtcgagagactttgtagaaacaacgaaggattaactccgctaggagtatacagtaagcatagatacgtaaaatctcagattgtgcatctactgatatccagctattcaaattcctctaacgaactcaagtcgaatataaatgatttcgatctgtattcggataatatcgacttacgtctgctaaaatacctaattgtggataaacggatacgtccgtccaagaatacgaattatgcaatcaatggtctcggattggtggatatatacgtaacgacgcctaatccgagaccagaagtattgctatggcttcttaaatcagaatgttacagcaccggttacgtatttcgtacctgtatgtacgacagtgatatgtgtaagaactctcttcattactatatatcgtctcatagagaatctcaatctctatccaaggatgtaattaaatgtttgatcgataacaatgtttccatccatggcagagacgaaggaggatctttacccatccaatactactggtctttctcaaccatagatatagagattgttaaattattattaataaaggatgtggacacgtgtagagtatacgacgtcagccctatattagaggcgtattatctaaacaagcgatttagagtaaccccatataatgtagacatggaaatcgttaatcttcttattgagagacgtcatactcttgtcgacgtaatgcgtagtattacttcgtacgattccagagaatataaccactacatcatcgataacattctaaagagatttagacaacaggatgaatccatcgtacaagccatactgataaactacttacattacggcgatatggtcgttcgatgcatgttagataacggacaacaactatcctctacacgactactttgttaataataatctcgtcgatgtaaacgtcgtaaggtttatcgtggaaaatatggacacgcggctgtaaatcacgtatcgaacaatggccgtctatgtatgtacggtctgatattatcgagatttaataattgcgggtatcactgttatgaaaccatactgatagatgtatttgatatactaagcaagtacatggatgatatagatatgatcgataactctactatattacgcggtcgatgtcaataatatacaatttgcaaagcggttattggaatatggagcgagtatcacgctcgataatcaatacggccatccagaaaagcagttacagaagagaaaacaaaacgaaatcgttgttctacaagatgtctctccctacgacgattactacgtaaaaaagatactagcctactgcctattaagggacgagtcattcgcggaactacatagtaaattctgtttaaacgaggactataaaagtgtatttatgaaaaatatatcattcgataagatagattccatcatcgtgacataagtcgcctcaaagagattcgaatctccgacaccgacctgtatacggtatcacagctatcttaaagccatacattcagacagtcacatttcatttcccatgtacgacgatctcatagaacagtgccatctatcgatggagcgtaaaagtaaactcgtcgacaaagcactcaataaattagagtctaccatcggtcaatctagactatcgtatttgcctccggaaattatgcgcaatatcatctaaacagtatgttgtacggaaagaaccattacaaatattatccatgatagaaagaaaatatctatatgattggagaagtaggaaacaggaacaagacaacgattactacattattaaatcatgaagtccgtattatactcgtatatattgtttctctcatgtataataataaacggaagagatatagcaccgcatgcaccatccgatggaaagtgtaaagacaacgaatacaaacgccataatttgtgtccgggaacatacgcttccagattatgcgatagcaagactaacacacgatgtacgccgtgtggttcgggtaccttcacatctcgcaataatcatttacccgcttgtctaagttgtaacggaagacgcgatcgtgtaacacgactcacaatagaatctgtgaatgctctcccggatattattgtcttctcaaaggatcatccggatgcaaggcatgtgtttcccaaacaaaatgtggaataggatacggagtatccggagacgtcatctgttctccgtgtggtctcggaacatattctcacaccgtctcttccgcagataaatgcgaacccgtacccagaaatacgtttaactatatcgatgtggaaattaacctgtatccagttaacgacacgtcgtgtactcggacgaccactaccggtctcagcgaatccatctcaacgtcggaactaactattactatgaatcataaagactgtaatcccgtatttcgtgatggatacttctccgttcttaataaggtagcgacttcaggtttctttacaggagaaaggtgtgcactctgaatttcgagattaaatgcaataacaaagattcttcctccaaacagttaacgaaagcaaagaatgatactatcatgccgcattcggagacagtaactctagtgggcgacatctatatactatatagtaataccaatactcaagactacgaaactgatacaatctcttatcatgtgggtaatgttctcgatgtcgatagccatatgcccggtagttgcgatatacataaactgatcactaattccaaacccacccactttttatagtaagtttttcacccataaataataaatacaataattaatttctcgtaaaagtagaaaatatattctaatttattgcacggtaaggaagtagaatcataaagaacagtactcaatcaatagcaattatgaaacaatatatcgtcctggcatgcatgtgcctggcggcagctgctatgcctgccagtcttcagcaatcatcctcatcctcctcctcgtgtacggaagaagaaaacaaacatcatatgggaatcgatgttattatcaaagtcacaaagcaagaccaaacaccgaccaatgataagatttgccaatccgtaacggaaattacagagtccgagtcagatccagatcccgaggtggaatcagaagatgattccacatcagtcgaggatgtagatcctcctaccacttattactccatcatcggtggaggtctgagaatgaactttggattcaccaaatgtcctcagattaaatccatctcagaatccgctgatggaaacacagtgaatgctagattgtccagcgtgtccccaggacaaggtaaggactctcccgcgatcactcatgaagaagctcttgctatgatcaaagactgtgaagtgtctatcgacatcagatgtagcgaagaagagaaagacagcgacatcaagacccatccagtactcgggtctaacatctctcataagaaagtgagttacgaagatatcatcggttcaacgatcgtcgatacaaaatgcgtcaagaatctagagtttagcgttcgtatcggagacatgtgcaaggaatcatctgaacttgaggtcaaggatggattcaagtatgtcgacggatcggcatctgaaggtgcaaccgatgatacttcactcatcgattcaacaaaactcaaagcgtgtgtctgaatcgataactctattcatctgaaattggatgagtagggttaatcgaacgattcaggcacaccacgaattaaaaaagtgtaccggacactatattccggtttgcaaaacaaaaatgttcttaactacattcacaaaaagttacctctcgcgacttcttctttttctgtctcaatagtgtgatacgattatgacactattcctattcctattcctatttcctttcagagtatcacaaaaatattaaacctctttctgatggtctcataaaaaaagttttacaaaaatatttttattctctttctctctttgatggtctcataaaaaaagttttacaaaaatatttttattctctttctctctttgatggtctcataaaaaaagttttacaaaaatatttttattctctttctctctttgatggtctcataaaaaaagttttacaaaaatatttttattctctttctctctttgatggtctcataaaaaaagttttacaaaaatatttttattctctttctctctttgatggtctcataaaaaaagttttacaaaaatatttttattctctttctctctttgatggtctcataaaaaaagttttacaaaaatatttttattctctttctctctttgatggtctcataaaaaaagttttacaaaaatatttttattctctttctctctttgatggtctcataaaaaaagttttacaaaaatatttttattctctttctctctttgatggtctcataaaaaaagttttacaaaaatatttttattctctttctctctttgatggtctcataaaaaaagttttacaaaaatatttttattctctttctctctttgatggtctcataaaaaaagttttacaaaaatatttttattctctttctctctttgatggtctcataaaaaagttttacaaaaatatttttattctctttctctctttgatggtctcataaaaaagttttacaaaaatatttttattctctttctctctttgatggtctcataaaaaaagttttacaaaaatatttttattctctttctctctttgatggtctcataa

SEQ ID NO: 19 - DNA, 195695 bp, Artificial Sequence
  GLV-1h354
ttatgagaccatcaaagagagaaagagaataaaaatatttttgtaaaactttttttatgagaccatcaaagagagaaagagaataaaaatatttttgtaaaacttttttatgagaccatcaaagagagaaagagaataaaaatatttttgtaaaacttttttatgagaccatcaaagagagaaagagaataaaaatatttttgtaaaactttttttatgagaccatcaaagagagaaagagaataaaaatatttttgtaaaactttttttatgagaccatcaaagagagaaagagaataaaaatatttttgtaaaactttttttatgagaccatcaaagagagaaagagaataaaaatatttttgtaaaactttttttatgagaccatcaaagagagaaagagaataaaaatatttttgtaaaactttttttatgagaccatcaaagagagaaagagaataaaaatatttttgtaaaactttttttatgagaccatcaaagagagaaagagaataaaaatatttttgtaaaactttttttatgagaccatcaaagagagaaagagaataaaaatatttttgtaaaactttttttatgagaccatcaaagagagaaagagaataaaaatatttttgtaaaactttttttatgagaccatcaaagagagaaagagaataaaaatatttttgtaaaactttttttatgagaccatcaaagagagaaagagaataaaaatatttttgtaaaactttttttatgagaccatcaaagagagaaagagaataaaaatatttttgtaaaactttttttatgagaccatcagaaagaggtttaatatttttgtgatactctgaaaggaaataggaataggaataggaatagtgtcataatcgtatcacactattgagacagaaaaagaagaagtcgcgagaggtaactttttgtgaatgtagttaagaacatttttgttttgcaaaccggaatatagtgtccggtacacttttttaattcgtggtgtgcctgaatcgttcgattaaccctactcatccaatttcagatgaatagagttatcgattcagacacacgctttgagttttgttgaatcgatgagtgaagtatcatcggttgcaccttcagatgccgatccgtcgacatacttgaatccatccttgacctcaagttcagatgattccttgcacatgtctccgatacgaacgctaaactctagattcttgacgcattttgtatcgacgatcgttgaaccgatgatatcttcgtaactcactttcttatgagagatgttagacccgagtactggatgggtcttgatgtcgctgtctttctcttcttcgctacatctgatgtcgatagacacttcacagtctttgatcatagcaagagcttcttcatgagtgatcgcgggagagtccttaccttgtcctggggacacgctggacaatctagcattcactgtgtttccatcagcggattctgagatggatttaatctgaggacatttggtgaatccaaagttcattctcagacctccaccgatgatggagtaataagtggtaggaggatctacatcctcgactgatgtggaatcatcttctgattccacctcgggatctggatctgactcggactctgtaatttccgttacggattggcaaatcttatcattggtcggtgtttggtcttgctttgtgactttgataataacatcgattcccatatgatgtttgttttcttcttccgtacacgaggaggaggatgaggatgattgctgaagactggcaggcatagcagctgccgccaggcacatgcatgccaggacgatatattgtttcataattgctattgattgagtactgttctttatgattctacttccttaccgtgcaataaattagaatatattttctacttttacgagaaattaattattgtatttattatttatgggtgaaaaacttactataaaaagtgggtgggtttggaattagtgatcagtttatgtatatcgcaactaccgggcatatggctatcgacatcgagaacattacccacatgataagagattgtatcagtttcgtagtcttgagtattggtattactatatagtatatagatgtcgcccactagagttactgtctccgaatgcggcatgatagtatcattctttgctttcgttaactgtttggaggaagaatctttgttattgcatttaatctcgaaattcagagtgcacacctttctcctgtaaagaaacctgaagtcgctaccttattaagaacggagaagtatccatcacgaaatacgggattacagtctttatgattcatagtaatagttagttccgacgttgagatggattcgctgagaccggtagtggtcgtccgagtacacgacgtgtcgttaactggatacaggttaatttccacatcgatatagttaaacgtatttctgggtacgggttcgcatttatctgcggaagagacggtgtgagaatatgttccgagaccacacggagaacagatgacgtctccggatactccgtatcctattccacattttgtttgggaaacacatgccttgcatccggatgatcctttgagaagacaataatatccgggagagcattcacagattctattgtgagtcgtgttacacgatcgcgtcttccgttacaacttagacaagcgggtaaatgattattgcgagatgtgaaggtacccgaaccacacggcgtacatcgtgtgttagtcttgctatcgcataatctggaagcgtatgttcccggacacaaattatggcgtttgtattcgttgtctttacactttccatcggatggtgcatgcggtgctatatctcttccgtttattattatacatgagagaaacaatatatacgagtataatacggacttcatgatttaataatgtagtaatcgttgtcttgttcctgtttcctacttctccaatcatatagatattttctttctatcatggataatatttgtaatggttctttccgtacaacatactgtttagatgatattgcgcataatttccggaggcaaatacgatagtctagattgaccgatggtagactctaatttattgagtgctttgtcgacgagtttacttttacgctccatcgatagatggcactgttctatgagatcgtcgtacatgggaaatgaaatgtgactgtctgaatgtatggctttaagatagctgtgataccgtatacaggtcggtgtcggagattcgaatctctttgaggcgacttatgtcacgatgatggaatctatcttatcgaatgatatatttttcataaatacacttttatagtcctcgtttaaacagaatttactatgtagttccgcgaatgactcgtcccttaataggcagtaggctagtatcttttttacgtagtaatcgtcgtagggagagacatcttgtagaacaacgatttcgttttgttttctcttctgtaactgcttttctggatggccgtattgattatcgagcgtgatactcgctccatattccaataaccgctttgcaaattgtatattattgacatcgaccgcgtaatatagtagagttatcgatcatatctatatcatccatgtacttgcttagtatatcaaatacatctatcagtatggtttcataacagtgatacccgcaattattaaatctcgataatatcagaccgtacatacatagacggccattgttcgatacgtgatttacagccgcgtgtccatattttccacgataaaccttacgacgtttacatcgacgagattattattaacaaagtagtcgtgtagaggatagttgttgtccgttatctaacatgcatcgaacgaccatatcgccgtaatgtaagtagtttatcagtatggcttgtacgatggattcatcctgttgtctaaatctctttagaatgttatcgatgatgtagtggttatattctctggaatcgtacgaagtaatactacgcattacgtcgacaagagtatgacgtctctcaataagaagattaacgatttccatgtctacattatatggggttactctaaatcgcttgtttagataatacgcctctaatatagggctgacgtcgtatactctacacgtgtccacatcctttattaataataatttaacaatctctatatctatggttgagaaagaccagtagtattggatgggtaaagatcctccttcgtctctgccatggatggaaacattgttatcgatcaaacatttaattacatccttggatagagattgagattctctatgagacgatatatagtaatgaagagagttcttacacatatcactgtcgtacatacaggtacgaaatacgtaaccggtgctgtaacattctgatttaagaagccatagcaatacttctggtctcggattaggcgtcgttacgtatatatccaccaatccgagaccattgattgcataattcgtattcttggacggacgtatccgtttatccacaattaggtattttagcagacgtaagtcgatattatccgaatacagatcgaaatcatttatattcgacttgagttcgttagaggaatttgaatagctggatatcagtagatgcacaatctgagattttacgtatctatgcttactgtatactcctagcggagttaatccttcgttgtttctacaaagtctctcgactccgcgagagaacaatcttaatgtctgtatcgcatttattggagacgtaacaatgtagcgcattgtttcctcgtctatctatatgttttgataagttgtgacacgtttcaatttctagttttatttttttgtacgtcacatcttcatccagtagacgacatagaatagtgcactctctaccacaataatccatagctattctggtgctaattattcctatttcacgaaggcaatcattcctcataagatgataaaaagtgtagtggagatttagtatttagcagtgcggatatgatccaagagggtgagatagtcgttctcgttcagaatctttcgcagcataagtagtatgtcgatatacttatcgttgaagactctttataaaagtctatttgtttatatttattgcggatagcagtatttccctataaaaagtatacgtcctgtggtgtctttaatcatgtacatgaatggatggtttatgtagaccttcgtacgatataccatcgaaaagttaatcgtaaatactcctgtaacggccgatgcttctgtatactcctcattaacatctataaacgtcgtatgtagaaatttttctacagtgatagtttcattacacatcttgctaaaatctgcataatatccgaatatattagtaagtcctaaattttctaaaatcggtaccagattatacggttctgtcatttccactttaaactttggcatatacaagtctatacttttagtagataacataccacaccattttttaaatttttcatctgttatatttttttctatgttatatataccttctatgtcgtccggtagtataattaccatactagagtttccctcgtatggaatatcgataatagagaatcctccgaataattcattaatatgtacatattgcaagttattctcggtacccaccatcatatcaacgctggtaactatattcttagaaatataaaacttgtctgtatatgtaagatgtttagaaaatggatatttccacattgctttaaaatggacggcgctaacaactgtcatacgagtattaatggatagcggactagtcaataaggaattaattttaccatttgtcattgtcttaacccattcgttgattagttcctttgtttggttagcattattaaagtttacagtttgaaaatcgtcttttattttttgtaggaaggaggcgtggaactcgatactatcgctaccgtatattttatttgcggtagctagtgtcgcacaatacggaatatctacctccatgtcatcattattgtcatcgggtgtattctcattcatattctctatatattttgatagttgttcagctgtagaaccagctgctccatgatttagaatagataaagtagataaaatggaaactggagaaatcaaaacattttcatcagggtgttttaagattagttctttaaagatatccatggtatagacctaacgataacgatatatatcataaataaataatgttaaatttcaatttatgtttgtaccccgtattcatacttaacaaattggtattgcgtacacaatcaatcatattacataccattaataatgcaagcataaaaaattgttagtagatgtttctaaatataggttccgtaagcaaagaatataagaatgaagcggtaatgataaaatcaatcgttatctaaaatgatcatactcatttattttattctattatattaacacatacatttttaacagcaacacattcaatattgtattgttatttttatattatttacacaattaacaatatattattagtttatattactgaattaataatataaaattcccaatcttgtcataaacacacactgagaaacagcataaacacagaatccatcaaaaatgttgataaattatctgatgttgttgttcgctgctatgataatcagatcattcgccgatagtggtaacgctatcgaaacgacattgccagaaattacaaacgctacaacagatattccagctatcagattatgcggtccagagggagatggatattgtttacacggtgactgtatccacgctagagatattgacggtatgtattgtagatgctctcatggttatacaggcattagatgtcagcatgtagtattagtagactatcaacgttcagaaaacccaaacactacaacgtcatatatcccatctcccggtattatgcttgtattagtaggcattattatgtgttgtctattatctgtttataggttcactcgacgaactaaactacctatacaagatatggttgtgccataatttttataaatttttttatgagtatttttacaaaaatgtataaagtgtatgtcttatgtatatttataaaaatgctaagtatgcgatgtatctatgttatttgtatttatctaaacaatacctctacctctagatattatacaaaaattttttatttcggcatattaaagtaaaatctagttaccttgaaaatgaatacagtgggtggttccgtatcaccagtaagaacataatagtcaaatacagtatccgattgagattttgcatacaatactagtctagaaagaaatttgtaatcatcttctgtgacgggagtccatatatctgtatcatcgtctagtttatcagtgtcccatgctatattcctgttatcatcattagttaatgaaaataactctcgtgcttcagaaaagtcaaatattgtatccatacatacatctccaaaactatcgcttatacgtttatctttaacgatacctatacctagatggttatttactaacagacattttccagatctattgactataactcctatagtttccacatcaaccaagtaatgatcatctattgttatataacaataacataactcttttccatttttatcagtatgtatatctatatcaacgtcgtcgttgtagtgaatagtagtcattgatctattatatgaaacggatatgtctagaacggcaattgttttacgtccagttaacactttcgttgatttaaagtctagagtctttgcaaacataatatccttatccgactttatatttcctgtagggtggtataattttattttgcctccacatatcggtgtttccaaatatattactagacaatattccatatagttattagttaagggtacccaattagaacacgtacgcttattatcatcatttggatcgtatttcataaaagttattgtgttatcgatgtcaacacattctacattttttaatcgtctatatagtatttttctgatattttctataatatcagaattgtcttccatcggaagttgtatactatcggaatcagttacatgtttaaataattctctgatgtcattccttatacaatcaaattcattattaaacagtttaatagtctgtagacctttatcgtcgtaaatatccattgtcttattagttacgcttatttttatgtgtttttacgttgctttattatattttataagaatgattgtttgacgaatcacgagaactattaagacacattattaggtatatattataaaaaagtttttgattacgatgttataagaggaaagaggacacattaacatcatacatcaattaactacattcttataacatcgtaatcaaaagaattgcaattttgatgtataacaactgtcaatgggttatggaattgtatattacatattatacggtatgttggtaacgacaaataccggtcggtaattgtctgccggtgtaatagaattatatatatctatctattacaccggccttgtatacataataataagttgtggtagtatgatctccatatttataatttaggactttgtattcagtatttttggaatcataaaaaataaaaaaaagttttactaatttaaaatttaaaaagtatttacatttttttcactgtttagtcgcggatatggaattcgatcctgccaaaatcaatacatcatctatagatcatgtaacaatattacaatacatagatgaaccaaatgatataagactaacagtatgcattatccgaaatattatatcaatatcacaaaaataaatacacatttggctaatcaatttcgggcttggaaaaaacgtatcgccggaagggactatatgactaacttatctagagatacaggaatacaacaatcaaaacttactgaaactatacgtaactgtcaaaaaaatagaaacatatatggtctatatatacactacaatttagttattaattggataaccgatgtgattatcaatcaatattaagagggttggtaaattggtacatagctaataatacctatactccaaatacacccaataatacaacaaccatttctgagttggatatcatcaaaatactaaataaatacgaggacgtgtatagagtaagtaaagaaaaagaatgtggaatttgctatgaagttgtttactcaaaacgatagatactttggtttattggattcgtgtactcatatattttgcataacatgcatcaatatatggcatagaacacgaagagaaaccggtgcgtcggataattgtcctatatgccgtacccgttttagaaacataacaatgagcaagttctataagctagttaactaataaataaaaagtttaatttgttgacgacgtatgtcgttattttttctcgtataaaagattaatttgattctaatataatctttagtattggataaatatcaattcaaattaattccattagattatatcataaataaaaatagtagcacacaactacttcagcaaacattctttttataaatgccatctagcgtagcgaggacacaagtgaacctataattatcaaatttattagtatcagtcacatgaaggactttacgtagagtgacgattccactatctgtggtacgaacggtttcatcttctttgatgccatcacccagatgttctataaacttggtatcctcgtccgatttcatatcctttgccaaccaatacatatagctaaactcaggcatatgttccacacatcctgaacaatgaaattctccagaagatgttacaatgtctagatttggacatttggtttcaaccgcgttaacatatgagtgaacacacccatacatgaaagcgatgagaaataggattctcatcttgccaaaatatcactagaaaaaatttatttatcagttttaaaggtataaaaaatacttattgttgctcgaatattttgtatttgatggtatacggaagattagaaatgtaggtattatcatcaactgattctatggttttatgtattctatcatgtttcactattgcgttggaaataatatcatatgcttccacatatattttattttgttttaactcataatactcacgtaattctggattattggcatatctatgaataattttagctccatgatcagtaaatattaatgagaacatagtattaccacctaccattatttttttcatctcattcaattcttaattgcaaagatctatataatcattatagcgttgacttatggactctggaatcttagacgatgtacagtcatctataatcatggcatatttaatacattgttttatagcatagtcgttatctacgatgttagatatttctctcaatgaatcaatcacacaatctaatgtaggtttatgacataatagcattttcagcagttcaatgtttttagattcgttgatggcaatggctatacatgtatatccgttatttgatctaatgttgacatctgaaccggattctagcagtaaagatactagagattgtttattatatctaacagccttgtgaagaagtgtttctcctcgtttgtcaatcatgttaatgtctttaagataaggtaggcaaatgtttatagtactaagaattgggcaagcataagacatgtcacaaagacccttttttgtatgtataagtgtaaaaattataacatccatagttggatttacataggtgtccaatcgggatctctccatcatcgagataattgatggcatctcccttccttttttagtagatatttcatcgtgtaagaatcaatattaatatttctaaagtatccgtgtatagcctctttatttaccacagctccatattccactagagggatatcgccgaatgtcatatactcaattagtatatgttggaggacatccgagttcattgttttcaatatcaaagagatggtttccttatcatttctccatagtggtacaatactacacattattccgtgcggctttccattttccaaaaacaatttgaccaaatctaaatctacatctttattgtatctataatcactatttagataatcagccataattcctcgagtgcaacatgttagatcgtctatatatgaataagcagtgttatctattcctttcattaacaatttaacgatgtctatatctatatgagatgacttaatataatattgaagagctgtacaatagtttttatctataaaagacggcttgattccgtgattaattagacatttaacaacttccggacgcacatatgctctcgtatccgactctgaatacagatgagagatgatatacagatgcaatacggtaccgcaatttcgtagttgataatcatcatacgcgtatcagtactcgtcctcataaagaacactgcagccattttctatgaacaaatcaataattttagaaacaggatcattgtcattacataattttctataactgaacgatggttttcacatttaacactcaagtcaaatccatgttctaccaacacctttatcaagtcaacgtctacatttttggatttcatatagctgaatatattaaagttatttatgttgctaaatccagtggcttctagtagagccatcgctatatccttattaactttaacatgtctactatttgtgtattcttctaatggggtaagctgtctccaatttttgcgtaatggattagtgccactgtctagtagtagtttgacgacctcgacattattacaatgctcattaaaaaggtatgcgtgtaaagcattattcttgaattggttcctggtatcattaggatctctgtctttcaacatctgtttaagttcatcaagagccacctcctcattttccaaatagtcaaacattttgactgaatgagctactgtgaactctatacacccacacaactaatgtcattaaatatcatgtcaaaaacttgtacaattattaataaaaataatttagtgtttaaattttaccagttccagattttacacctccgttaatacctccattaaccccactggacgatcctcctccccacattccaccgccaccagatgtataagttttagatcctttattactaccatcatgtccatggataaagacactccacatgccgccactaccccctttagaagacatattaataagacttaaggacaagtttaacaataaaattaatcacgagtaccctactaccaacctacactattatatgattatagtttctatttttacagtaccttgactaaagtttctagtcacaagagcaatactaccaacctacactattatatgattatagtttctatttttataggaacgcgtacgagaaaatcaaatgtctaatttctaacggtagtgttgataaacgattgttatccgcggatacctcctctatcatgtcgtctattttcttactttgttctattaacttattagcattatatattatttgattataaaacttatattgcttattagcccaatctgtaaatatcggattattaacatatcgtttctttgtaggtttatttaacatgtacatcactgtaagcatgtccttaccatttattttaatttgacgcatatccgcaatttctttttcgcagtcggttataaattctatatatgatggatacatgctacatgtgtacttataatcgactaatatgaagtacttgatacatattttcagtaacgatttattattaccacctatgaataagtacctgtgatcgtctaggtaatcaactgttttcttaatacattcgatggttggtaatttactcagaataatttccaatatcttaatatataattctgctatttctgggatatatttatctgccagtataacacaaatagtaatacatgtaaacccatattttgttattatattaatgtctgcgccattatctattaaccattctactaggctgacactatgcgactcaatacaatgataaagtatactacatccatgtttatctattttgtttatatcatcaatatacggcttacaaagttttagtatcgataacacatccaactcacgcatagagaaggtagggaataatggcataatatttattaggttatcatcattgtcattatctacaactaagtttccattttttaaaatatactcgacaactttaggatctctattgccaaatttttgaaaatatttatttatatgcttaaatctatataatgtagctccttcatcaatcatacatttaataacattgatgtatactgtatgataagatacatattctaacaatagatcttgtatagaatctgtatatcttttaagaattgtggatattaggatattattacataaactattacacaattctaaaatataaaacgtatcacggtcgaataatagttgatcaactatataattatcgattttgtgatttttcttcctaaactgtttacgtaaatagttagatagaatattcattagttcatgaccactatagttactatcgaataacgcgtcaaatatttcccgtttaatatcgcatttgtcaagataataatagagtgtggtatgttcacgataagtataataacgcatctctttttcgtgtgaaattaaatagtttattacgtccaaagatgtagcataaccatcttgtgacctagtaataatataataatagagaactgttttacccattctatcatcataatcagtggtgtagtcgtaatcgtaatcgtctaattcatcatcccaattataatattcaccagcacgtctaatctgttctattttgatcttgtatccatactgtatgttgctacatgtaggtattcctttatccaataatagtttaaacacatctacattgggatttgatgttgtagcgtatttttctacaatattaataccatttttgatactatttatttctatacctttcgaaattagtaatttcaataagtctatattgatgttatcagaacatagatattcgaatatatcaaaatcattgatatttttatagtcgactgacgacaataacaaaatcacaacatcgtttttgatattattatttttcttggtaacgtatgcctttaatggagtttcaccatcatactcatataatggatttgcaccactttctatcaatgattgtgcactgctggcatcgatgttaaatgttttacaactatcatagagtatcttatcgttaaccatgattggttgttgatgctatcgcattttttggtttctttcatttcagttatgtatggatttagcacgtttgggaagcatgagctcatatgatttcagtactgtagtgtcagtactattagtttcaataagatcaatctctagatctatagaatcaaaacacgataggtcagaagataatgaatatctgtaggcttcttgttgtactgtaacttctggttttgttagatggttgcatcgtgctttaacgtcaatggtacaaattttatcctcgctttgtgtatcatattcgtccctactataaaattgtatattcagattatcatgcgatgtgtatacgctaacggtatcaataaacggagcacaccatttagtcataaccgtaatccaaaaatttttaaagtatatcttaacgaaagaagttgtgtcattgtctacggtgtatggtactagatcctcataagtgtatatatctagagtaatgtttaatttattaaatggttgataatatggatcctcgtgacaatttccgaagatggaaataagacataaacacgcaataaatctaattgcggacatggttactccttaaaaaaatacgaataatcaccttggctatttagtaagtgtcatttaacactatactcatattaatccatggactcataatctctatacgggattaacggatgttctatatacggggatgagtagttctcttctttaactttatactttttactaatcatatttagactgatgtatgggtaatagtgtttgaagagctcgttctcatcatcagaataaatcaatatctctgtttttttgttatacagatgtattacagcctcatatattacgtaatagaacgtgtcatctaccttattaactttcaccgcatagttgtttgcaaatacggttaatcctttgacctcgtcgatttccgaccaatctgggcgtataatgaatctaaactttaattgcttgtaatcattcgaaataatttttagtttgcatccgtagttatcccctttatgtaactgtaaatttctcaacgcgatatctccattaataatgatgtcgaattcgtgctgtatacccatactgaatggatgaacgaataccgacggcgttaatagtaatttactttttcatctttacatattgggtactagttttactatcataagtttataaattccacaagctactatggaataagccaaccatcttagtataccacacatgtcttaaagtttattaattaattacatgttgttttatatatatcgctacgaatttaaagagaaattagtttaggaagaaaaattatctatctacatcatcacgtctctgtattctacgatagagtgctactttaagatgcgacagatccgtgtcatcaaatatatactccattaaaatgattattccggcagcgaacttgatattggatatatcacaacctttgttaatatctacgacaatagacagcagtcccatggttccataaacagtgagtttatctttctttgaagagatattttgtagagatcttataaaactgtcgaatgacatcgcatttatatctttagctaaatcgtatatgttaccatcgtaatatctaaccgcgtctatcttaaacgtttccatcgctttaaagacgtttccgatagatggtctcatttcatcagtcatactgagccaacaaatataatcgtgtataacatctttgatagaatcagactctaaagaaaacgaatcggctttattatacgcattcatgataaacttaatgaaaaatgtttttcgttgtttaagttggatgaatagtatgtcttaataattgttattatttcattaattaatatttagtaacgagtacactctataaaaacgagaatgacataactaatcataactagttatcaaagtgtctaggacgcgtaattttcatatggtatagatcctgtaagcattgtctgtattctggagctattttctctatcgcattagtgagttcagaatatgttataaatttaaatcgaataacgaacataactttagtaaagtcgtctatattaactcttttattttctagccatcgtaataccatgtttaagatagtatattctctagttactacgatctcatcgttgtctagaatatcacatactgaatctacatccaattttagaaattggtctgtgttacatatctcttctatattattgttgatgtattgtcgtagaaaactattacgtagaccattttctttataaaacgaatatatagtactccaattatctttaccgatatatttgcacacataatccattctctcaatcactacatctttaagattttcgttgttaagatatttggctaaactatataattctattagatcatcaacagaatcagtatatatttttctagatccaaagacgaactctttggcgtcctctataatattcccagaaaagatattttcgtgttttagtttatcgagatctgatctgttcatatacgccatgattgtacggtacgttatgataaccgcataaaataaaaatccattttcatttttaaccaatactattcataattgagattgatgtaatactttgttactttgaacgtaaagacagtacacggatccgtatctccaacaagcacgtagtaatcaaatttggtgttgttaaacttcgcaatattcatcaatttagatagaaacttatactcatcatctgttttaggaatccatgtattattaccactttccaacttatcattatcccaggctatgtttcgtccatcatcgttgcgcagagtgaataattcttttgtattcggtagttcaaatatatgatccatgcatagatcggcaaagctattgtagatgtgatttttcctaaatctaatataaaactcgtttactagcaaacactttcctgatttatcgaccaagacacatatggtttctaaatctatcaagtggtggggatccatagttatgacgcagtaacatatattattacattcttgactgtcgctaatatctaaatatttattgttatcgtattggattctgcatatagatggcttgtatgtcaaagatatagaacacataaccaatttatagtcgcgctttacattctcgaatctaaagttaagagatttagaaaacattatatcctcggatgatgttatcactgtttctggagtaggatatattaaagtctttacagatttcgtccgattcaaataaatcactaaataatatcccacattatcatctgttagagtagtatcattaaatctattatattttatgaaagatatatcactgctcacctctatatttcgtacatttttaaactgtttgtataatatctctctgatacaatcagatatatctattgtgtcggtagacgataccgttacatttgaattaatggtgttccattttacaacttttaacaagttgaccaattcatttctaatagtatcaaactctccatgattaaatattttaatagtatccattttatatcactacggacacaaagtagctgacataaaccattgtataatttttatgttttatgtttattagcgtacacattttggaagttccggcttccatgtatttcctggagagcaagtagatgatgaggaaccagatagtttatatccgtacttgcacttaaagtctacattgtcgttgtatgagtatgatcttttaaacccgctagacaagtatccgtttgatattgtaggatgtggacatttaacaatctgacacgtgggtggatcggaccattctcctcctgaacacaggacactagagttaccaatcaacgaatatccactattgcaactataagttacaacgctcccatcggtataaaaatcctcgtatccgttatgtcttccgttggatatagatggaggggattggcatttaacagattcacaaataggtgcctcgggattccataccatagatccagtagatcctaattcacaatacgatttagattcaccgatcaactgatatccgctattacaagagtacgttatactagagccaaagtctactccaccaatatcaagttggccattatcgatatctcgaggcgatgggcatctccgtttaatacattgattaaagagtgtccatccagtacctgtacatttagcatatataggtcccattttttgctttctgtatccaggtagacatagatattctatagtgtctcctatgttgtaattagcattagcatcagtctccacactattcttaaatttcatattaatgggtcgtgacggaatagtacagcatgatagaacgcatcctattcccaacaatgtcaggaacgtcacgctctccaccttcatatttatttatccgtaaaaatgttatcctggacatcgtacaaataataaaaagcccatatatgttcgctattgtagaaattgtttttcacagttgctcaaaaacgatggcagtgacttatgagttacgttacactttggagtctcatctttagtaaacatatcataatattcgatattacgagttgacatatcgaacaaattccaagtatttgattttggataatattcgtattttgcatctgctataattaagatataatcaccgcaagaacacacgaacatctttcctacatggttaaagtacatgtacaattctatccatttgtcttccttaactatatatttgtatagataattacgagtctcgtgagtaattccagtaattacatagatgtcgccgtcgtactctacagcataaactatactatgatgtctaggcatgggagacttttttatccaacgatttttagtgaaacattccacatcgtttaatactacatatttctcatacgtggtataaactccacccattacatatatatcatcgtttacgaataccgacgcgcctgaatatctaggagtaattaagtttggaagtcttatccatttcgaagtgccgtgtttcaaatattctgccacacccgttgaaatagaaaattctaatcctcctattacatataactttccatcgttaacacaagtactaacttctgattttaacgacgacatattagtaaccgttttccattttttcgttttaagatctacccgcgatacggaataaacatgtctattgttaatcatgccgccaataatgtatagacaattatgtaaaacatttgcattatagaattgtctatctgtattaccgactatcgtccaatattctgttctaggagagtaatgggttattgtggatatataatcagagtttttaatgactactatattatgttttataccatttcgtgtcactggctttgtagatttggatatagttaatcccaacaatgatatagcattgcgcatagtattagtcataaacttgggatgtaaaatgttgatgatatctacatcgtttggatttttatgtatccactttaataatatcatagctgtaacatcctcatgatttacgttaacgtcttcgtgggataagatagttgtcagttcatcctttgataattttccaaattctggatcggatgtcaccgcagtaatattgttgattatttctgacatcgacgcattatatagttttttaattccatatcttttagaaaagttaaacatccttatacaatttgtgaaattaatattatgaatcatagtttttacacatagatctactacaggcggaacatcaattattatggcagcaactagtatcatttctacattgtttatggtgatgtttatcttcttccagcgcatatagtctaatagcgattcaaacgcgtgatagtttataccattcaatataatcgcttcatcctttagatggtgatcctgaatgcgtttaaaaaaattatacggagacgccgtaataatttccttattcacttgtataatttccccattgatagaaaatattacgctttccattcttaaagtactataagtaattatagtataatgtaaacgtttatatattcaatatttttataaaaatcattttgacattaattcctttttaaatttccgtctatcatctatagaaacgtattctatgaatttataaaatgcttttacgtgtcctatcgtaggcgatagaaccgctaaaaagcctatcgaatttctacaaaagaatctgttatatggtatagggagagtataaaacattaaatgtccgtacttattaaagtattcagtagccaatcctaactctttcgaatacttattaatggctcttgttctgtacgaatctatttttttgaacaacggacctagtggtatatcttgttctatgtatctaaaataatgtctgactagatccgttagtttaatatccgcagtcatcttgtctagaatggcaaatctaactgcgggtttaggctttagtttagtttctatatctacatctatgtctttatctaacaccaaaaatataatagctaatattttattacaatcatccggatattcttctacgatctcactaactaatgtttctttggttatactagtatagtcactatcggacaaataaagaaaatcagatgatcgatgaataatacatttaaattcatcatctgtaagatttttgagatgtctcattagaatattattagggttagtactcattatcattcggcagctattacttattttattatttttcaccatatagatcaatcattagatcatcaaaatatgtttcaatcatcctaaagagtatggtgaatgactcttcccatctaatttctgaacgttcaccaatgtctctagccactttggcactaatagcgatcattcgcttagcgtcttctatattattaactggttgatttaatctatctagcaatggaccgtcggacagcgtcattctcatgttcttaatcaatgtacatacatcgccgtcatctaccaattcatccaacaacataagctttttaaaatcatcattataataggtttgatcgttgtcatttctccaaagaatatatctaataagtagagtcctcatgcttagttaacaactattttttatgttaaatcaattagtacaccgctatgtttaatacttattcatattttagtttttaggattgagaatcaatacaaaaattaatgcatcattaattttagaaatacttagtttccacgtagtcaatgaaacatttgaactcatcgtacaggacgttctcgtacaggacgtaactataaaccggtttatatttgttcaagatagatacaaatccgataactttttttacgaattctacgggatccactttaaaagtgtcataccgggttctttttatttttttaaacagatcaatggtgtgatgttgattaggtcttttacgaatttgatatagaatagcgtttacatattctccataatggtcaatcgccatttgttcgtatgtcataaattctttaattatatgacactgtgtattatttagttcatccttgttcattgttaggaatctatccaaaatggcaattatactagaactataggtgcgttgtatacacatattgatgtgtctgtttatacaatccatgatatttggatccatgctactaccttcgggtaaaattgtagcatcatataccatttctagtactttaggttcattattatccattgcagaggacgtcatgatcgaatcataaaaaaatatattatttttatgttattttgttaaaaataatcatcgaatacttcgtaagatactccttcatgaacataatcagttacaaaacgtttatatgaagtaaagtatctacgatttttacaaaagtccggatgcataagtacaaagtacgcgataaacggaataataatagatttatctagtctatctttttctatagctttcatagttagatacatggtctcagaagtaggattatgtaacatcagcttcgataaaatgactgggttatttagtcttacacattcgctcatacatgtatgaccgttaactacagagtctacactaaaatgattgaacaatagatagtctaccattgtttcgtattcagatagtacagcgtagtacatggcatcttcacaaattatatcattgtctaatagatatttgacgcatcttatggatcccacttcaacagccatcttaaaatcatattgctttcctttatcattaataatttctagaacatcatctctatcataaaagatacaaatattaactgtttgatccgtaataacattgctagtcaatagcaatttgttaataagatgcgctgggctcaatgtcttaataagaagtgtaagaggactatctccgaatttgttttgtttattaacatccgttgatggaagtaaaagatctataatgtctacattcttgactgttttagagcatacaatatggagaggtgtatttccatcatgatctggttttgagggactaattcctagtttcatcatccatgagattgtagaagcttttggattgtctgacataagatgtctatgaatatgatttttgccaaatttatccactatcctggcttcgaatccgatggacattatttttttaaacactctttctgaaggatctgtacacgccaacaacggaccacatccttcttcatcaaccgagttgttaatcttggctccatactgtaccaataaatttattctctctatgacttcatcatctgttcccgagagataatatagaggtgttttatgctgtttatcacacgcgtttggatctgcgccgtgcgtcagcagcatcgcgactattctattattattaattttagaagctatatgcaatggataatttccatcatcatccgtctcatttggagagtatcctctatgaagaagttcttcgacaaatcgttcatctagtcctttaattccacaatacgcatgtagaatgtgataattatttccagaaggttcgatagcttgtagcatattcctaaatacatctaaatttttactattatatttggcataaagagatagataatactcggccgacataatgttgtccattgtagtataaaaattaatatttctatttctatttctgtatatttgcaacaatttactctctataacaaatatcataacttagtttttttatgtcaagaaggcactggtttagttcatctataaatgtcacgccataactaccacgcatgccatactcagaattatgataaagatatttatccttggggtgtaggtaatggggattaatctttgttggatcagtctctaagttaacacatgtcacacatgatccatttatagttatatcacacgatgatgatttatgaattgattccggaagatcgctatcgtattttgtggttccacaattcatttccatacatgttattgtcacactaatattatgatgaactttatctagccgctgagtggtaaacaacagaacagatagtttattatctttaccaacaccctcagccgctgccacaaatctctgatccgtatccatgatggtcatgtttatttctagtccgtatccagtcaacactatgttagcatttctgtcgatatagctttcactcatatgacactcaccaataatagtagaattaatgtcgtaatttacaccaatagtgagttcggcggcaaagtaccaataccggtaatcttgtcgaggaggacatatagtattcttgtattctaccgaatacccgagagatgcgatacaaaagagcaagactaatttgtaaaccatcttactcaaaatatgtaacaatagtacgatgcaatgagtaagacaataggaaatctatcttatatacacataattattctatcaattttaccaattagttagtgtaatgttaacaaaaatgtgggagaatctaattagtttttctttacacaattgacgtacatgagtctgagttccttgtttttgctaattatttcatccaatttattattcttgacgatatcgagatcttttgtataggagtcaaacttgtattcaacatgcttttctataatcattttagctatttcggcatcatccaatagtacattttccagattagcagaatagatattaatgtcgtatttgaacagagcctgtaacatctcaatgtctttattatctatagccaatttaatgtccggaatgaagagaagggaattattggtgtttgtcgacgtcatatagtcgagcaagagaatcatcatatccacgtgtccattttttatagtgatgtgaatacaactaaggagaatagccagatcaaaagtagatggtatctctgaaagaaagtaggaaacaatacttacatcattaagcatgacggcatgataaaatgaagttttccatccagttttcccatagaacatcagtctccaatttttcttaacaaacagttttaccgtttgcatgttaccactatcaaccgcataatacaatgcggtgtttcccttgtcatcaaattgtgaatcatccagtccactgaatagcaaaatctttactattttggtatcttccaatgtggctgcctgatgtaatggaaattcattctctagaagatttttcaatgctccagcgttcaacaacgtacatactagacgcacgttattatcagctattgcataatacaaggcactatgtccatggacatccgccttaaatgtatctttactagagagaaagcttttcagctgcttagacttccaagtattaattcgtgacagatccatgtctgaaacgagacgctaattagtgtatattttttcattttttataattttgtcatattgcaccagaattaataatatctttaatagatctgattagtagatacatggctatcgcaaaacaacatatacacatttaataaaaataatatttattaagaaaattcagatttcacgtacccatcaatataaataaaataatgattccttacaccgtacccatattaaggagattccaccttacccataaacaatataaatccagtaatatcatgtctgatgatgaacacaaatggtgtattaaattccagtttttcaggagatgatctcgccgtagctaccataatagtagatgcctctgctacagttccttgttcgtcgacatctatctttgcattctgaaacattttataaatatataatgggtccctagtcatatgtttaaacgacgcattatctggattaaacatactaggagccatcatttcggctatcgacttaatatccctcttattttcgatagaaaatttagggagtttaagattgtacactttattccctaattgagacgaccaatagtctaattttgcagccgtgatagaatctgtgaaatgggtcatattatcacctattgccaggtacatactaatattagcatccttatacggaaggcgtaccatgtcatattctttgtcatcgattgtgattgtatttccttgcaatttagtaactacgttcatcatgggaaccgttttcgtaccgtacttattagtaaaactagcattgcgtgttttagtgatatcaaacggatattgccatatacctttaaaatatatagtattaatgattgcccatagagtattattgtcgagcatattagaatctactacattagacataccggatctacgttctactatagaattaattttattaaccgcatctcgtctaaagtttaatctatataggccgaatctatgatattgttgataatacgacggtttaatgcacacagtattatctacgaaactttgataagttagatcagtgtacgtatatttagatgttttcagcttagctaatcctgatattaattctgtaaatgctggacccagatctctttttctcaaatccatagtcttcaataattctattctagtattacctgatgcaggcaatagcgacataaacatagaaaacgaataaccaaacggtgagaagacaatattatcatcttgaatatttttatacgctactataccggcattggtaaatccttgtagacgataggcggacgctgaacacgctaacgatagtatcaataacgcaatcatgattttatggtattaataattaaccttatttttatgttcggtataaaaaaattattgatgtctacacatccttttgtaattgacatctatatatccttttgtataatcaactctaatcactttaacttttacagttttccctaccagtttatccctatattcaacatatctatccatatgcatcttaacactctctgccaagatagcttcagagtgaggatagtcaaaaagataaatatatagagcataatcattctcgtatactctgccctttattacatcacccgcattgggcaacgaataacaaaatgcaagcatcttgttaacgggctcgtaaattgggataaaaattatgtttttattgtcttatatctattttattcaagagaatattcaggaatttctttttccggttgtatctcgtcgcagtatatatcatttgtacattgtttcatattttttaatagtttacaccttttagtaggactagtatcgtacaattcatagctgtattttgaattccaatcacgcataaaaatatcttccaattgttgacgaagacctaatccatcatccggtgtaatattaatagatgctccacatgtatccgtaaagtaatttcctgtccaatttgaggtacctatataggccgttttatcggttaccatatatttggcatggtttaccctagaatacggaatgggaggatcagcatctggtacaataaatagctttacttctatatttatgtttttagattttagcatagcgatagatcttaaaaagtttctcatgataaacgaagatcgttgccagcaactaatcaatagcttaacggatacttgtctgtctatagcggatcttcttaattcatcttctatataaggccaaaacaaaattttacccgccttcgaataaataatagggataaagttcataacagatacataaacgaatttactcgcatttctaatacatgacaataaagcggttaaatcattggttctttccatagtacatagttgttgcggtgcagaagcaataaatacagagtgtggaacgccgcttacgttaatactaagaggatgatctgtattataatacgacggataaaagtttttccaattatatggtagattgttaactccaagataccagtatacctcaaaaatttgagtgagatccgctgccaagttcctattattgaagatcgcaatacccaattccttgacctgagttagtgatctccaatccatgttagcgcttcctaaataaatatgtgtattatcagatatccaaaattttgtatgaagaactcctcctaggatatttgtaatatctatgtatcgtacttcaactccggccatttgtagtctttcaacatcctttaatggtttgttagatttattaacggctactctaactcgtactcctcttttgggtaattgtacaatctcgtttaatattatcgtgccgaaattcgtacccacttcatccgataaactccaataaaaagatgatatatctagtgtttttgtggtattggatagaatttccctccacatgttaaatgtagacaaatatactttatcaaattgcatacctataggaatagtttctgtaatcactgcgattgtattatccggattcattttatttgttaaaagaataatcctatatcacttcactctattaaaaatccaagtttctatttctttcatgactgattttttaacttcatccgtttccttatgaagatgatgtttggcaccttcataaatttttatttctctattacaatttgcatgttgcatgaaataatatgcacctaaaacatcgctaatcttattgtttgttccctggagtatgagagtcggggggtgttaatcttggaaattatttttctaaccttgttggtagccttcaagacctgactagcaaatccagccttaattttttcatgattgactaatgggtcgtattggtatttataaactttatccatatctctagatactgattctggacatagctttccgactggcgcatttggtgtgatggttcccataagtttggcagctagcagattcagtcttgaaacagcatctgcattaactagaggagacattagaatcattgctgtaaacaagtttggattatcgtaagaggctagctcccatggaatgacccaataagtagatttaatagttaccacgtgctgtaccaaagtcatcaatcatcattttttcaccattacttcttccatgtccaatatgatcatgtgagaatactaaaattcctaacgatgatatgttttcagctagttcgtcataacgtccagaatgtttaccagctccatgacttatgaatactaatgccttaggatatgtaataggtttccaatatttacaatatatgtaatcattgtccagattgaacatacagtttgcactcatgattcacgttatataactatcaatattaacagttcgtttgatgatcatattatttttatgttttattgataattgtaaaaacatacaattaaatcaatatagaggaaggagacggctactgtcttttgtaagatagtcatggcgactaaattagattatgaggatgctgttttttactttgtggatgatgataaaatatgtagtcgcgactccatcatcgatctaatagatgaatatattacgtggagaaatcatgttatagtgtttaacaaagatattaccagttgtggaagactgtacaaggaattgatgaagttcgatgatgtcgctatacggtactatggtattgataaaattaatgagattgtcgaagctatgagcgaaggagaccactacatcaattttacaaaagtccatgatcaggaaagtttattcgctaccataggaatatgtgctaaaatcactgaacattggggatacaaaaagatttcagaatctagattccaatcattgggaaacattacagatttgatgaccgacgataatataaacatcttgatactttttctagaaaaaaaattgaattgatgatataggggtcttcataacgcataattattacgttagcattctatatccgtgttaaaaaaaattatcctatcatgtatttgagagttttatatgtagcaaacatgatagctgtgatgccaataagctttagatattcacgcgtgctagtgttagggatggtattatctggtggtgaaatgtccgttatataatctacaaaacaatcatcgcatatagtatgcgatagtagagtaaacatttttatagtttttactggattcatacatcgtctacccaattcggttataaatgaaattgtcgccaatcttacacccaaccccttgttatccattagcatagtattaacttcgttatttatgtcataaactgtaaatgattttgtagatgccatatcatacatgatattcatgtccctattataatcattactaactttatcacaatatatgttgataatatctatatatgatctagtctttgtgggcaactgtctatacaagtcgtctaaacgttgtttactcatatagtatcgaacagccatcattacatggtcccgttccgttgatagataatcgagtatgttagtggacttgtcaaatctatataccatattttctggaagtggatatacatagtcgtgatcaacattattgctagcctcatcttctatatcctgtactataccattatctatatcatctacataatctatgatattattacacataaacatcgacaacatactattgtttattatctaagtcctgttgatccaaacccttgatctcctctatttgtactatctagagattgtacttcttccagttctggataatatatacgttgatagattagctgagctattctatctccagtatttacattaaacgtacattttccattattaataagaatgactcctatgtttcccctataatcttcgtctattacaccacctcctatatcaatgccttttagtgacagaccagacctaggagctattctaccatagcagaacttaggcatggacatactaatatctgtcttaattaactgtctttctcctggagggatagtataatcgtaagcgctatacaaatcatatccggcagcacccggcgattgcctagtaggagatttagctctgttagtttccttaacaaatctaactggtgagttaatattcatgttgaacataaaactaatattttatttcaaaattatttaccatcccatatattccatgaataagtgtgatgattgtacacttctatagtatctatatacgatccacgataaaatcctcctatcaatagcagtttattatccactatgatcaattctggattatccctcggataaataggatcatctatcagagtccatgtattgctggattcacaataaaattccgcatttctaccaaccaagaataaccttctaccgaacactaacgcgcatgatttataatgaggataataagtggatggtccaaactgccactgatcatgattgggtagcaaatattctgtagttgtatcagtttcagaatgtcctcccattacgtatataacattgtttatggatgccactgctggattacatctaggtttcagaagactcggcatattaacccaagcagcatccccgtggaaccaacgctcaacagatgtgggatttggtagacctcctactacgtataatttattgttagcgggtatcccgctagcatacagtctggggctattcatcggaggaattggaatccaattgtttgatatataatttacagctatagcattgttatgtatttcattgttcatccatccaccgatgagatatactacttctccaacatgagtacttgtacacatatggaatatatctataatttgatccatgttcataggatactctatgaatggatacttgtatgatttgcgtggttgtttatcacaatgaaatattttggtacagtctagtatccattttacattatttatacctctgggagaaagataatttgacctgattacatttttgataaggagtagcagatttcctaatttatttcttcgcctcatataccacttaatgacaaaatcaactacataatcctcatctggaacatttagttcatcgctttctagaataagtttcatagatagataatcaaaattgtctatgatgtcatcttccagttccaaaaagtgtttggcaataaagtttttagtatgacataagagattggatagtccgtattctatacccatcatgtaacactcgacacaatattcctttctaaaatctcgtaagataaagtttatacaagtgtagatgataaattctacagaggttaatatagaagcacgtaataaattgacgacgttatgactatctatatatacctttccagtatatgagtaaataactatagaagttaaactgtgaatgtcaaggtctagacaaacccttgtaactggatctttatttttcgtgtatttttgacgtaaatgtgtgcgaaagtaaggagataactttttcaatatcgtagaattgactattatattgcctcctatggcatcaataattgttttgaatttcttagtcatagacaatgctaatatattcttacagtacacagtattgacaaatatcggcatttatgtttctttaaaagtcaacatctagagaaaaatgattatctttttgagacataactcccattttttggtattcacccacacgtttttcgaaaaaattagtttttccttccaatgatatattttccatgaaatcaaacggattggtaacattataaatttttttaaatcccaattcagaaatcaatctatccgcgacgaattctatatatgttttcatcatttcacaattcattcctataagtttaactggaagagccgcagtaagaaattcttgttcaatggatactgcatctgttataatagatctaacggtttcttcactcggtggatgcaataaatgtttaaacatcaaacatgcgaaatcgcagtgcagaccctcgtctctactaattagttcgttggaaaacgtgagtccgggcattaggccacgctttttaagccaaaatatggaagcgaatgatccagaaaagaaaattccttctactgcagcaaaggcaataagtctctctccataaccggcgctgtcatgtatccacttttgagcccaatcggccttcttttttacacaaggcatcgtttctatggcattaaagagatagtttttttcattactatctttaacataagtatcgatcaaaagactatacatttccgaatgaatgttttcaatggccatctgaaatccgtagaaacatctagcctcggtaatctgtacttctgtacaaaatcgttccgccaaattttcattcactattccgtcactggctgcaaaaaacgccaatacatgttttataaaatatttttcgtctggtgttagtttattccaatcattgatatctttagatatatctacttcttccactgtccaaaatgatgcctctgcctttttatacatgttccagatgtcatgatattggattgggaaaataacaaatctatttggatttggtgcaaggatgggttccataactaaattaacaataacaataaattttttttcagttatctatatgcctgtacttggattttttgtacatcgatatcgccgcaatcactacaataattacaagtattattgatagcattgttattagtactatcataattaaattatctacattcatgggtgctgaataatcgttattatcatcattatcattttgtaattgtgacatcatactagataaatcgtttgcgagattgttgtgggaagcgggcatggaggatgcattatcattattatttaacgccttccatttggattcacaaatgttacgcacattcaacattttatggaaactataattttgtgaaaacaaataacaagaaaactcgtcatcgttcaaatttttaacgatagtaaaccgattaaacgtcgagctaatttctaacgctagcgactctgttggatatgggtttccagatatatatcttttcagttcccctacgtatctataatcatctgtaggaaatggaagatatttccatttatctactgttcctaatatcatatgtggtggtgtagtagaaccattaagcgcgaaagatgttatttcgcatcgtattttaacttcgcaataatttctggttagataacgcactctaccagtcaagtcaatgatattagcctttacagatatattcatagtagtcgtaacgatgactccatcttttagatgcgatactcctttgtatgtaccagaatcttcgtacctcaaactcgatatatttaaacaagttaatgagatattaacgcgttttatgaatgatgatatataaccagaagttttatcctcggtggctagcgctataaccttatcattataataccaactagtgtgattaatatgtgacacgtcagtgtgggtacaaatatgtacattatcgtctacgtcgtattcgatacatccgcatacagccaacaaatataaaatgacaaatactctaacgccgttcgtacccatcttgatgcggtttaataaatgttttgatttcaatttattgtaaaaaaagattcggttttatactgttcgatattctcattgcttatattttcatctatcatctccacacagtcaaatccgtggttagcatgcacctcatcaaccggtaaaagactatcggactcttctatcattataactctagaatatttaatttggtcattattaatcaagtcaattatcttatttttaacaaacgtgagtattttactcattttttataaaaacttttagaaatatacagactctatcgtgtgtctatatcttctttttatatccaatgtatttatgtctgatttttcttcatttatcatatataatggtccaaattctacacgtgcttcggattcatccagatcattaaggttcttataattgtaacatccttctcttccctcttctacatcttccttcttattcttattcttagcgtcacagaatctaccacagcaggatcccatgacgagcgtcatattaaactaatccattttcaattataatatatgattagtaatgaccattaaaataaaaaatattcttcataaccggcaagaaagtgaaaagttcacattgaaactatgtcagtagtatacatcatgaaatgatgatatatatatactctattttggtggaggattatatgatataattcgtggataatcatttttaagacacatttctttattcgtaaatcttttcacgttaaatgagtgtccatattttgcaatttcttcatatgatggcggtgtacgtggacgaggctgctcctgttcttgttgtggtcgccgactgtcgtgtctgcgtttagatccctccattatcgcgattgcgtagatggagtactattttataccttgtaattaaatttttttattaattaaacgtataaaaacgttccgtatctgtatttaagagccagatttcgtctaatagaacaaatagctacagtaaaaataactagaataattgctacacccactagaaaccacggatcgtaatacggcaatcggttttcgataataggtggaacgtatattttatttaaggacttaacaattgtctgtaaaccacaatttgcttccgcggatcctgtattaactatctgtaaaagcatatgttgaccgggcggagccgaacattctccgatatctaatttctgtatatctataatattattaacctccgcatacgcattacagttcttttctagcttggataccgcactaggtacatcgtctagatctattcctatttcctcagcgatagctcttctatccttttccggaagcaatgaaatcacttcaataaatgattcaaccatgagtgtgaaactaagtcgagaattactcatgcatttgttagttattcggagcgcgcaatttttaaactgtcctataacctctcctatatgaatagcacaagtgacattagtagggatagaatgttgagctaatttttgtaaataactatctataaaaagattatacaaagttttaaactctttagtttccgccatttatccagtctgagaaaatgtctctcataataaatttttccaagaaactaattgggtgaagaatggaaacctttaatctatatttatcacagtctgttttggtacacatgatgaattcttccaatgccgtactaaattcgatatctttttcgatttctggatatgtttttaataaagtatgaacaaagaaatggaaatcgtaataccagttatgtttaactttgaaattgttttttattttcttgttaatgattccagccacttgggaaaagtcaaagtcgtttaatgccgatttaatacgttcattaaaaacaaactttttatcctttagatgaattattattggttcattggaatcaaaaagtaagatattatcgggtttaagatctgcgtgtaaaaagttgtcgcaacagggtagttcgtagattttaatgtataacagagccatctgtaaaaagataaactttatgtattgtaccaaagatttaaatcctaatttgatagctaactcggtatctactttatctgccgaatacagtgctaggggaaaaattataatgtttcctctttcatattcgtagttagttctcttttcatgttcgaaaaagtgaaacatgcggttaaaatagtttataacattaatattactgttaataactgccggataaaagtgggatagtaatttcacgaatttgatactgtcctttctctcgttaaacgcctttaaaaaaactttagaagaatatctcaatgagagttcctgaccatccatagtttgtatcaataatagcaacatatgaagaacacgtttatacagagtatgtaaaaatgttaatttatagtttaatcccatggcccacgcacacacgattaattttttttcatctccctttagattgttgtatagaaatttgggtactgtgaactccgccgtagtttccatgggactatataattttgtggcctcgaatacaaattttactacatagttatctatcttaaagactataccatatcctcctgtagatatgtgataaaaatcgtcgtttataggataaaatcgtttatccttttgttggaaaaaggatgaattaatgtaatcattctcttctatctttagtagtgtttccttattaaaattcttaaaataatttaacaatctaactgacggagcccaattttggtgtaaatctaattgggacattatattgttaaaatacaaacagtctcctaatataacagtatctgataatctatggggagacatccattgatattcaggggatgaatcattggcaacacccatttattgtacaaaaagccccaatttacaaacgaaagtccaggtttgatagagacaaacaattaactattttgtctctgtttttaacacctccacagtttttaatttctttagtaatgaaattattcacaatatcagtatcttctttatctaccagagattttactaacttgataaccttggctgtctcattcaatagggtagtaatatttgtatgtgtgatattgatatctttttgaattgtttcttttagaagtgattctttgatggtgccagcatacgaattacaataatgcagaaactcggttaacatgcaggaattatagtaagccaattccaattgttgcctgtgttgtattagagtgtcaatatgagcaatggtgtccttgcgtttctctgatagaatgcgagcagcgattttggcgttatcatttgacgatatttctggaatgacgaatcctgtttctactaactttttggtaggacaaagtgaaacaatcaagaagatagcttctcctcctatttgtggaagaaattgaactcctctagatgatctactgacgatagtatctccttgacagatattggaccgaattacagaagtacctggaatgtaaagccctgaaaccccctcattttttaagcagattgttgccgtaaatcctgcactatgcccaagatagagagctcctttggtgaatccatctctatgtttcagtttaaccaagaaacagtcagctggtctaaaatttccatctctatctaatacagcatctaacttgatgtcaggaactatgaccggtttaatgttatatgtaacattgagtaaatccttaagttcataatcatcactgtcatcagttatgtacgatccaaacaatgtttctaccggcatagtggatacgaagatgctatccatcagaatgtttccctgattagtattttctatatagctattcttctttaaacgattttccaaatcagtaactatgttcatttttttaggagtaggacgcctagccagtatggaagaggattttctagatcctctcttcaacatctttgatctcgatggaatgcaaaaccccatagtgaaacaaccaacgataaaaataatattgtttttcactttttataattttaccatctgactcatggattcattaatatctttataagagctactaacgtataattctttataactgaactgagatatatacaccggatctatggtttccataattgagtaaatgaatgctcggcaataactaatggcaaatgtatagaacaacgaaattatactagagttgttaaagttaatattttctatgagctgttccaataaattatttgttgtgactgcgttcaagtcataaatcatcttgatactatccagtaaaccgtttttaagttctggaatattatcatcccattgtaaagcccctaattcgactatcgaatatcctgctctgatagcagtttcaatatcgacggacgtcaatactgtaataaaggtggtagtattgtcatcatcgtgataaactacgggaatatggtcgttagtaggtacggtaactttacacaacgcgatatataactttccttttgtaccatttttaacgtagttgggacgtcctgcagggtattgttttgaagaaatgatatcgagaacagatttgatacgatatttgttggattcctgattattcactataatataatctagacagatagatgattcgataaatagagaaggtatatcgttggtaggataatacatccccattccagtattctcggatactctattgatgacactagttaagaacatgtcttctattctagaaaacgaaaacatcctacatggactcattaaaacttctaacgctcctgattgtgtctcgaatgcctcgtacaaggatttcaaggatgccatagattctttgaccaacgatttagaattgcgtttagcatctgatttttttattaaatcgaatggtcggctctctggtttgctaccccaatgataacaatagtcttgtaaagataaaccgcaagaaaatttatacgcatccatccaaataaccctagcaccatcggatgatattaatgtattattatagattttccatccacaattattgggccagtatactgttagcaacggtatatcgaatagattactcatgtaacctactagaatgatagttcgtgtactagtcataatatctttaatccaatctaaaaaatttaaaattagattttttacactgttaaagttaacaaaagtattacccgggtacgtggatatcatatatggcattggtccattatcagtaatagctccataaactgatacggcgatggtttttatatgtgtttgatctaacgaggaagaaattcgcgcccacaattcatctctagatatgtatttaatatcaaacggtaacacatcaatttcgggacgcgtatatgtttctaaatttttaatccaaatataatgatgacctatatgccctattatcatactgtcaactatagtacacctagggaacttacgatacatctgtttcctataatcgttaaattttacaaatctataacatgctaaaccttttgacgacagccattcattaatttctgatatggaatctgtattctcgataccgtatcgttctaaagccagtgctatatctccctgttcgtgggaacgctttcgtataatatcgatcaacggataatctgaagtttttggagaataatatgactcatgatctatttcgtccataaacaatctagacataggaattggaggcgatgatcttaattttgtgcaatgagtcgtcaatcctataacttctaatcttgtaatattcatcatcgacataatactatctatgttatcatcgtatattagtataccatgaccttcttcatttcgtgccaaaatgatatacagtcttaaatagttacgcaatatctcaatagtttcataattgttagctgttttcatcaaggtttgtatcctgtttaacatgatggcgttctataacgtctctattttctatttttaattttttaaatttttaacgatttactgtggctagatacccaatctctctcaaatatttttttagcctcgcttacaagctgtttatctatactattaaaactgacgaatccgtgattttggtaatgggttccgtcgaaatttgccgaagtgatatgaacatattcgtcgtcgactatcaacaattttgtattattctgaatagtgaaaaccttcacagatagatcattttgaacacacaacgcatctagacttttggcggttgccatagaatatacgtcgttcttatcccaattaccaactagaagtctgatcttaactcctctattaatggctgcttctataatggagttgtaaatgtcgggccaatagtagctattaccgtcgacacgtgtagtgggaactatggccaaatgttcaatatctatactagtcttagctgacctgagtttatcaataactacatcggtatctagatctctagaatatcccaataggtgttccggagaatcagtaaagaacactccacctataggattcttaatatgatacgcagtgctaactggcaaacaacaagccgcagagcataaattcaaccatgaattttttgcgctattaaaggctttaaaagtatcaaatcttctacgaagatctgtggccagcgggggataatcagaatatacacctaacgttttaatcgtatgtatagatcctccagtaaatgacgcgtttcctacataacatctttcatcatctgacacccaaaaacaaccgagtagtagtcccacattattttttttatctatattaacggttataaaatttatatccgggcagtgactttgtagctctcccagatttcttttccctcgttcatctagcaaaactattattttaatccctttttcagatgcctcttttagtttatcaaaaataagcgctcccctagtcgtactcagaggattacaacaaaaagatgctatgtatatatatttcttagctagagtgataatttcgttaaaacattcaaatgttgttaaatgatcggatctaaaatccatattttctggtagtgtttctaccagcctacattttgctcccgcaggtaccgatgcaaatggccacatttagttaacataaaaacttatacatcctgttctatcaacgattctagaatatcatcggctatatcgctaaaattttcatcaaagtcgacatcacaacctaactcagtcaatatattaagaagttccatgatgtcatcttcgtctatttctatatccgtatccattgtagattgttgaccgattatcgagtttaaatcattactaatactcaatccttcagaatacaatctgtgtttcattgtaaatttataggcggtgtatttaagttggtagattttcaattatgtattaatatagcaacagtagttcttgctcctccttgattctagcatcctcttcattattttcttctacgtacataaacatgtccaatacgttagacaacacaccgacgatggcggccgcaggatcctcaagagccagactcacatttcagctgcttttccaggccacagatgatcagttccaggccaaaaaggaatgcaggctcagccccttggtggtcaaacaactcaatagcttgccgcagcagtggtggcatggagtcagtggtgggggtctccctctcctccttggcaacttggtgctcctggtcctccagcacacagcccaaggtgaagtggcccacagcagagagggcatacaaggcattttccagggagaagccttgttggcacaggaatgccagctggttctccagggtctcatactgcttctctgtaggcctggtgcccaagtgaactttggcaccatcccggtgggagagcaaggcacatctgaagctcttggcattgttcctcaggaagtcctgccaggactccccttccagagggcagaagtgggtgtggtgcctgtccaacatctcaatggccagggcatcaagcagagccctcttgttcttcacatgccagtacagggtaggctgctccacacccagcttctgggccagcttcctggtggtcaagccctcaatgccaacttcattcaggagctccaaggcagagttgatgactttgctcttgtccagtctggacatctcgacttcgagcttatttatattccaaaaaaaaaaaataaaatttcaatttttaagcttacagacacgaatatgactaaaccgatgaccatttaaaaacccctctctagctttcacttaaactgtatcgatcattcttttagcacatgtataatataaaaacattattctatttcgaatttaggcttccaaaaatttttcatccgtaaaccgataataatatatatagacttgttaatagtcggaataaatagattaatgcttaaactatcatcatctccacgattagagatacaatatttacattctttttgctgtttcgaaactttatcaatacacgttaatacaaacccaggaaggagatattgaaactgaggctgttgaaaatgaaacggtgaatacaataattcagataatgtaaaatcatgattccgtattctgatgatattagaactgctaatggatgtcgatggtatgtatctaggagtatctattttaacaaagcatcgatttgctaatatacaattatccttttgattaattgttattttattcatattcttaaaaggtttcatatttatcaattcttctacattaaaaatttccatttttaatttatgtagccccgcaatactcctcattacgtttcattttttgtctataatatccattttgttcatctcggtacatagattatccaattgagaagcgcatttagtagttttgtacattttaagtttattgacgaatcgtcgaaaactagttatagttaacattttattatttgataccctgatattaatacccctgccgttactattatttataactgatgtaatccacgtaacattggaattaactatcgatagtaatgcatcgacgcttccaaaattgtctattataaactcaccgataatttttttattgcatgttttcatattcattaggattatcaaatctttaatcttattacgattgtatgcgttgatattacaagacgtcattctaaaagacggaggatctccatcaaatgccagacaatcacgtacaaagtacatggaaataggttttgttctattgcgcatcatagatttatatagaacacccgtagaaatactaatttgttttactctataaaatactaatgcatctatttcatcgttttgtataacgtctttccaagtgtcaaattccaaatttttttcattgatagtaccaaattcttctatctctttaactacttgcatagataggtaattacagtgatgcctacatgccgttttttgaaactgaatagatgcgtctagaagcgatgctacgctagtcacaatcaccactttcatatttagaatatatatatgtaaaaatatagtagaatttcattttgtttttttctatgctataaatgaattctcattttgcatctgctcatactccgttttatattaataccaaagaaggaagatatctggttctaaaagccgttaaagtatgcgatgttagaactgtagaatgcgaaggaagtaaagcttcctgcgtactcaaagtagataaaccctcatcgcccgcgtgtgagagaagaccttcgtccccgtccagatgcgagagaatgaataaccctggaaaacaagttccgtttatgaggacggacatgctacaaaatatgttcgcggctaatcgcgataatgtagcttctagacttttgtcctaaaatactattatatccttttcgatattaataaatccgtgtcgtccaggttttttatctctttcagtatgtgaatagataggtattttatctctattcatcatcgaatttaagagatccgataaacattgtttgtattctccagatgtcagcatctgatacaacaatatatgtgcacataaacctctggcacttatttcatgtaccttccccttatcactaaggagaatagtatttgagaaatatgtatacatgatattatcatgaattagatatacagaatttgtaacactctcgaaatcacacgatgtgtcggcgttaagatctaatatatcactcgataacacattttcatctagatacactagacattttttaaagctaaaatagtctttagtagtaacagtaactatgcgattattttcatcgatgatacatttcatcggcatattattacgcttaccatcaaagactataccatgtgtatatctaacgtattctagcatggttgccatacgcgcattaaacttttcaggatctttggatagatcttccaatctatctatttgagaaaacatttttatcatgttcaatagttgaaacgtcggatccactatatagatattatctataaagattttaggaactacgttcatggtatcctggcgaatattaaaactatcaatgatatgattatcgttttcatcttttatcaccatatagtttctaagatatgggattttacttaatataatattatttcccgtgataaattttattagaaaggccaaatctataagaaaagtcctagaattagtctgaagaatatctatatcgccgtatagtatatttggattaattagatatagagaatatgatccgtaacatatacaacttttattatggcgtctaagatattcttccatcaacttattaacatttttgactagggaagatacattatgacgtcccattacttttgccttgtctattactgcgacgttcatagaatttagcatatctcttgccaattcttccattgatgttacattataagaaattttagatgaaattacatttggagctttaatagtaagaactcctaatatgtccgtgtatgtggtcactaatacagattgtagttctataatcgtaaataatttacctatattatatgtttgagtctgtttagaaaagtagctaagtatacgatcttttatttctgatgcagatgtattaacatcggaaaaaaatctttttttattcttttttactaaagatacaaatatgtctttgttaaaaacagttattttctgaatatttctagcttgtaattttaacatatgatattcgttcacactaggtactctgcctaaataggtttctataatctttaatgtaatattaggaaaagtattctgatcaggattcctattcattttgaggatttaaaactctgattattgtctaatatggtctctacgcaaactttttcacagagcgatagagtttttgataactcgtttttcttaagaaatataaaactactgtctccagagctcgctctatcttttattttatctaattcgatacaaactcctgatactggttcagaaagtaattcattaattttcagtcctttatagaagatatttaatatagataatacaaaatcttcagtttttgatatcgatctgattgatcctagaactagatatattaataacgtgctcattaggcagtttatggcagcttgataattagatatagtatattccagttcatatttattagataccgcattgcccagattttgatattctatgaattcctctgaaaataaatccaaaataactagacattctattttttgtggattagtgtactctcttccctctatcatgttcactactggtgtccacgatgataaatatctagagggaatataatatagtccataggatgccaatctagcaatgtcgaataactgtaattttattcttcgctcttcattatgaattgattcttgaggtataaacctaacacaaattatattattagacttttcgtatgtaatgtctttcatgttataagtttttaatcctggaatagaatctattttaatgaggcttttaaacgcagagttctccaacgagtcaaagcataatactctgttgtttttcttatatacgatgttacgattttcttctttgaatggaataggtttttgaattagtttataattacaacataatagataaggaagtgtgcaaatagtacgcggaaaaaacataatagctcccctgttttcatccatggttttaagtaaatgatcactggcttctttagtcaatggatattcgaacattaaccgtttcatcatcattggacagaatccatatttcttaatgtaaagagtgatcaaatcattgtgtttattgtaccatcttgttgtaaatgtgtattcggttatcggatctgctcctttttctattaaagtatcgatgtcaatctcgtctaagaattcaactatatcgacatatttcatttgtatacacataaccattactaacgtagaatgtataggaagagatgtaacgggaacagggtttgttgattcgcaaactattctaatacataattcttctgttaatacgtcttgcacgtaatctattatagatgccaagatatctatataattattttgtaagatgatgttaactatgtgatctatataagtagtgtaataattcatgtattttgatatatgttccaactctgtctttgtgatgtctagtttcgtaatatctatagcatcctcaaaaaatatattcgcatatattcccaagtcttcagttctatcttctaaaaaatcttcaacgtatggaatataataatctattttacctcttctgatatcattaatgatatagtttttgacactatcttctgtcaattgattcttattcactatatctaagaaacggatagcgtccctaggacgaactactgccattaatatctctattatagcttctggacataattcatctattataccagaattaatgggaactattccgtatctatctaacatagttttaagaaagtcagaatctaagacttgatgttcatatattggttcatacatgaaatgatctctattgatgatagtgactatttcattctctgaaaattggtaactcattctatatatgctttccttgttgatgaaggatagaatatactcaatagaatttgtaccaacaaactgttctcttatgaatcgtatatcatcatctgaaataatcatgtaaggcatacatttaacaattagagacttgtctcctgttatcaatatactattcttgtgataatttatgtgtgaggcaaatttgtccacgttctttaattttgttatagtagatatcaaatccaatggagctacagttcttggcttaaacagatatagtttttctggaacaaattctacaacattattataaaggactttgggtagataagtgggatgaaatcctattttaattaatgcgatagccttgtcctcgtgcagatatccaaacgcttttgtgatagtatggcattcattgtctagaaacgctctacgaatatctgtgacagatatcatctttagagaatatactagtcgcgttaatagtactacaatttgtattttttaatctatctcaataaaaaaattaatatgtatgattcaatgtataactaaactactaactgttattgataactagaatcagaatctaatgatgacgtaaccaagaagtttatctactgccaatttagctgcattatttttagcatctcgtttagattttccatcggccttatcgaatactcttccgtcgatgtctacacaggcataaaatgtaggagagttactaggcccaactgattcaatacgaaaagaccaatctctcctagtaatttggcagtactcattaataacggtgacagggttagcatctttccaatcaataatttttttagccggaataacatcatcaaaagacttatgatcctctctcattgatttttcgcgggatacatcatctattatgacgtcagccatagcatcagcatccggcttatccgcctccgttgtcataaaccaacgaggaggaatatcgtcggagctgtacaccatagcactacgttgaagatcgtacagagctttattaacttctcgcttctccatattaagttgtctagttagttgtgcagcagtagctccttcgattccaatgtttttaatagccgcacacacaatctctgcgtcagaacgctcgtcaatatagatcttagacatttttagagagaactaacgcaaccagcaataaaactgaacctactttatcatttttttattcatcatcctctggtggttcgtcgttcctatcaaatgtagctctgattaacccgtcatctataggtgatgctggttctggagattctggaggagatggattattatctggaagaatctctgttatttccttgttttcatgtatcgattgcgttgtaacattaagattgcgaaatgctctaaatttgggaggcttaaagtgttgtttgcaatctctacacgcgtgtctaactagtggaggttcgtcagctgctctagtttgaatcatcatcggcgtagtattcctacttttacagttaggacacggtgtattgtatttctcgtcgagaacgttaaaataatcgttgtaactcacatcctttattttatctatattgtattctactcctttcttaatgcattttataccgaataagagatagcgaaggaattctttttcggtgccgctagtacccttaatcatatcacatagtgttttatattccaaatttgtggcaatagacggtttatttctatacgatagtttgtttctggaatcctttgagtattctataccaatattattctttgattcgaatttagtttcttcgatattagattttgtattacctatattcttgatgtagtactttgatgatttttccatggcccattctattaagtcttccaagttggcatcatccacatattgtgatagtaattctcggatatcagtagcggctaccgccattgatgtttgttcattggatgagtaactactaatgtatacattttccatttataacacttatgtattaactttgttcatttatattttttcattattatgttgatattaacaaaagtgaatatatatatgttaataattgtattgtggttatacggctacaattttataatgagtgaaagtcagtgtccgatgatcaatgacgatagctttactctgaaaagaaagtatcaaatcgatagtgcggagtcaacaataaaaatggataagaagaggataaagtttcagaatagagccaaaatggtaaaagaaataaatcagacaataagagcagcacaaactcattacgagacattgaaactaggatacataaaatttaagagaatgattatgactactactctagaagatatagcaccatctattccaaataatcagaaaacttataaactattctcggacatttcagccatcggcaaagcatcacagaatccgagtaagatggtatatgctctgctgctttacatgtttcccaatttgtttggagatgatcatagattcattcgttatagaatgcatccaatgagtaaaatcaaacacaagatcttctctcctttcaaacttaatcttattagaatattagtggaagaaagattctataataatgaatgcagatctaataaatggagaataattggaacacaagttgataaaatgttgatagctgaatctgataaatatacaatagatgcaaggtataacctaaaacccatgtatagaatcaagggagaatctgaagaagataccctctttatcaaacagatggtagaacaatgtgtgacatcccaggaattggtggaaaaagtgttgaagatactgtttagagatttgttcaagagtggagaatacaaagcgtacagatacgatgatgatgtagaaaatggatttattggattggatacactaaaattaaacattgttcatgatatagttgaaccatgtatgcctgttcgtaggccagtggctaagatactgtgtaaagaaatggtaaataaatactttgagaatccgctacatattattggtaaaaatcttcaagagtgcattgactttgttagtgaataggcatttcatctttctccaatactaattcaaattgttaaattaataatggatagtataaatagttattagttataagatagtaaaaataattattagaataagagtgtagtatcatagataactctcttctataaaaatggattttattcgtagaaagtatcttatatacacagtagaaaataatatagattttttaaaggatgatacattaagtaaagtaaacaattttaccctcaatcatgtactagctctcaagtatctagttagcaattttcctcaacacgttattactaaggatgtattagctaataccaatttttttgttttcatacatatggtacgatgttgtaaagtgtacgaagcggttttacgacacgcatttgatgcacccacgttgtacgttaaagcattgactaagaattatttatcgtttagtaacgcaatacaatcgtacaaggaaaccgtgcataaactaacacaagatgaaaaatttttagaggttgccgaatacatggacgaattaggagaacttataggcgtaaattatgacttagttcttaatccattatttcacggaggggaacccatcaaagatatggaaatcatttttttaaaactgtttaagaaaacagacttcaaagttgttaaaaaattaagtgttataagattacttatttgggcatacctaagcaagaaagatacaggcatagagtttgcggataatgatagacaaaatatatacactctatttcaacaaactggtagaatcgtccatagcaatctaacagaaacgtttagagattatatctttcccggagataagactagctattgggtgtggttaaacgaaagtatagctaatgatgcggatatcgttcttaatagacacgccattaccatgtatgataaaattcttagttatatatactctgagataaaacaaggacgcgttaataaaaacatgcttaagttagtttatatctttgagcctgaaaaagatatcagagaacttctgctagaaatcatatatgatattcctggagatatcctatctattattgatgcaaaaaacgacgattggaaaaaatattttattagtttttataaagctaattttattaacggtaatacatttattagtgatagaacgtttaacgaggacttattcagagttgttgttcaaatagatcccgaatatttcgataatgaacgaattatgtctttattctctacgagtgctgcggacattaaacgatttgatgagttagatattaataacagttatatatctaatataatttatgaggtgaacgatatcacattagatacaatggatgatatgaagaagtgtcaaatctttaacgaggatacgtcgtattatgttaaggaatacaatacatacctgtttttgcacgagtcggatcccatggtcatagagaacggaatactaaagaaactgtcatctataaaatccaagagtagacggctgaacttgtttagcaaaaacattttaaaatattatttagacggacaattggctcgtctaggtcttgtgttagatgattataaaggagacttgttagttaaaatgataaaccatcttaagtctgtggaggatgtatccgcattcgttcgattttctacagataaaaaccctagtattcttccatcgctaatcaaaactattttagctagttataatatttccatcatcgtcttatttcaaaggtttttgagagataatctatatcatgtagaagaattcttggataaaagcatccatctaaccaagacggataagaaatatatacttcaattgataagacacggtagatcatagaacagaccaaatatattattaataatttgtatatacatagatataattatcacacatttttgataaatgggaactgctgcaacaattcagactcccaccaaattaatgaataaagaaaatgcagaaatgattttggaaaaaattgttgatcatatagttatgtatattagtgacgaatcaagtgattcagaaaataatcctgaatatattgattttcgtaacagatacgaagactatagatctctcattataaaaagtgatcacgagtttgtaaagctatgtaaaaatcatgcggagaaaagttctccagaaacgcaacaaatgattatcaaacacatatacgaacaatatcttattccagtatctgaagtactattaaaacctataatgtccatgggtgacataattacatataacggatgtaaagacaatgaatggatgctagaacaactctctaccctaaactttaacaatctccgcacatggaactcatgtagcataggcaatgtaacgcgtctgttttatacattttttagttatctgatgaaagataaactaaatatataagtataatcccattctaatactttaacctgatgtattagcatcttattagaatattaacctaactaaaagacataacataaaaactcattacatagttgataaaaagcggtaggatataaatattatggctgccaccgttccgcgttttgacgacgtgtacaaaaatgcacaaagaagaattctagatcaagaaacattttttagtagaggtctaagtagaccgttaatgaaaaacacatatctatttgataattacgcgtatggatggataccagaaactgcaatttggagtagtagatacgcaaacctagatgctagtgactattatcccatttcgttgggattacttaaaaagttcgagtttctcatgtctctatataaaggtcctattcccgtatatgaagaaaaagtaaatactgaattcatagccaatggatcgttctctggtagatacgtatcatatcttcgaaagttttctgcccttccaacaaacgagtttattagttttttgttactgacttccattccaatctataatatcttgttctggtttaaaaacacacagtttgatattactaaacacacattattcagatacgtctatacagataatgccaaacacctggcgttggctaggtatatgcatcaaacaggagactataagcctttgtttagtcgtctcaaagagaattatatatttaccggtcccgttccaataagtatcaaagatatagatcaccctaatcttagtagagcaagaagtccatccgattatgagacattagctaatattagtactatattgtactttaccaagtatgatccggtattaatgtttttattgttttacgtacctgggtattcaattactacaaaaattactccagccgtagaatatctaatggataaactgaatctaacaaagagcgacgtacaactgttgtaaattattttatgcttcgtaaaatgtaggttttgaaccaaacattctttcaaagaatgagatgcataaaactttattatccaatagattgactatttcggacgtcaatcgtttaaagtaaacttcgtaaaatattctttgatcactgccgagtttaaaacttctatcgataattgtctcatatgttttaatatttacaagttttttggtccatggtacattagccggacaaatatatgcaaaataatatcgttctccaagttctatagtttctggattatttttattatattcagtaactaaatacatattagggttatctgcggatttataatttgagtgatgcattctactcaacataaataattctagaggagacgatctactatcaaattcggatcgtaaatctgtttctaaagaacggagaatatctatacatacctgattagaattcatccgtccttcagacaacatctcagacagtctggttttgtacatcttaatcatattcttatgaaacttggaaacatctcttctagtttcactagtacctttattaattctctcaggtacagattttgaattcgacgatgctgagtatttcatcgttgtatatttcttcttcgattgcataatcagattcttatataccgcctcaaactctattttaaaattattaaacaatactctattattaatcagtcgttctaactctttcgctatttctatagacttatctacatcttgactgtctatctctgtaaacacggagtcggtatctccatacacgctacgaaaacgaaatctgtaatctataggcaacgatgttttcacaatcggattaatatctctatcgtccatataaaatggattacttaatggattggcaaaccgtaacataccgttagataactctgctccatttagtaccgattctagatacaagatcattctacgtcctatggatgtgcaactcttagccgaagcgtatgagtatagagcactatttctaaatcccatcagaccatatactgagttggctactatcttgtacgtatattgcatggaatcatagatggccttttcagttgaactggtagcctgttttagcatctttttatatctggctctctctgccaaaaatgttcttaatagtctaggaatggttccttctatcgatctatcgaaaattgctatttcagagatgaggttcggtagtctaggttcacaatgaaccgtaatatatctaggaggtggatatttctgaagcaatagctgattatttatttcttcttccaatctattggtactaacaacgacaccgactaatgtttccggagatagatttccaaagatacacacattaggatacagactgttataatcaaagattaatacattattactaaacattttttgttttggagcaaataccttaccgccttcataaggaaacttttgttttgtttctgatctaactaagatagttttagtttccaacaatagctttaacagtggacccttgatgactgtactcgctctatattcgaataccatggattgaggaagcacatatgttgacgcacccgcgtctgtttttgtttctactccataatactcccacaaatactgacacaaacaagcatcatgaatacagtatctagccatatctaaagctatgtttagattataatccttatacatctgagctaaatcaacgtcatcctttccgaaagataatttatatgtatcattaggtaaagtaggacataatagtacgactttaaatccattttcccaaatatctttacgaattactttacatataatatcctcatcaacagtcacataattacctgtggttaaaacctttgcaaatgcagcggctttgcctttcgcgtctgtagtatcgtcaccgatgaacgtcatttctctaactcctctatttaatactttacccatgcaactgaacgcgttcttggatatagaatccaatttgtacgaatccaatttttcaaatttttgaatgaatgaatatagatcgaaaaatatagttccattattgttattaacgtgaaacgtagtattggccatgccgcctactcccttatgactagactgatttctctcataaatacagagatgtacagcttcctttttgtccggagatctaaagataattttctctcctgttaataactctagacgattagtaatatatctcagatcaaagttatgtccgttaaaggtaacgacgtagtcgaacgttagttccaacaattgtttagctattcgtaacaaaactatttcagaacatagaactagttctcgttcgtaatccatttccattagtgactgtatcctcaaacatcctctatcgacggcttcttgtatttcctgttccgttaacatctcttcattaatgagcgtaaacaataatcgtttaccacttaaatcgatataacagtaacttgtatgcgagattgggttaataaatacagaaggaaacttcttatcgaagtgacactctatatctagaaataagtacgatcttgggatatcgaatctaggtatttttttagcgaaacagttacgtggatcgtcacaatgataacatccattgttaatctttgtcaaatattgctcgtccaacgagtaacatccgtctggagatatcccgttagaaatataaaaccaactaatattgagaaattcatccatggtggcattttgtatgctgcgtttctttggctcttctatcaaccacatatctgcgacggagcattttctatctttaatatctagattataacttattgtctcgtcaatgtctatagttctcatctttcccaacggcctcgcattaaatggaggaggagacaatgactgatatatttcgtccgtcactacgtaataaaagtaatgaggaaatcgtataaatacggtctcgccatttcgacatctggatttcagatataaaaatctgttttcaccgtgactttcaaaccaattaatgcaccgaacatccatttatagaatttagaaatatattttcatttaaatgaatcccaaacattggggaagagccgtatggaccattatttttatagtactttcgcaagcgggtttagacggcaacatagaagcgtgtaaacgaaaactatatactatagttagcactcttccatgtcctgcatgtagacggcacgcgactatcgctatagaggacaataatgtcatgtctagcgatgatctgaattatatttattattttttcatcagattatttaacaatttggcatctgatcccaaatacgcgatcgatgtgacaaaggttaaccctttataaacttaacccattataaaacttatgattagtcacaactgaaataaccgcgtgattattttttggtataattctacacggcatggtttctgtgactatgaattcaacccccgttacattagtgaaatctttaacaaacagcaagggttcgtcaaagacataaaactcattgtttacaatcgaaatagaccccctatcacacttaaaataaaaaatatccttatcctttaccaccaaataaaattctgattggtcaatgtgaatgtattcacttaacagttccacaaatttatttattaactccgaggcacatacatcgtcggtattttttatggcaaactttactcttccagcatccgtttctaaaaaaatattaacgagttccatttatatcatccaatattattgaaatgacgttgatggacagatgatacaaataagaaggtacggtacctttgtccaccatctcctccaattcatgctctattttgtcattaactttaatgtatgaaaacagtacgccacatgcttccatgacagtgtgtaacactttggatacaaaatgtttgacattagtataattgtccaagactgtcaatctataatagatagtagctataatatattctatgatggtattgaagaagatgacaaccttggcatattgatcatttaacacagacatggtatcaacagatagcttgaatgaaagagaatcagtaattggaataagcgtcttctcgatagagtgtccgtataccaacatgtctgatattttgatgtattccattaaattatttagttttttctttttattctcgttaaacagcatttctgtcaacggaccccaacatcgttgaccgattaagttttgattgatttttccgtgtaaggcgtatctagtcagatcgtatagcctatccaataatccatcgtctgtgtgtagatcacatcgtacactttttaattctctatagaagagcgacagacatctggagcaattacagacagcaatttctttattctctacagatgtaagatacttgaagacattcctatgatgatgcagaattttggataacacggtattgatggtatctgttaccataattcctttgatggctgatagtgtcagagcacaagatttccaatctttgacaatttttagcaccattatctttgttttgatatctatatcagacagcatggtgcgtctgacaacacagggattaagacggaaagatgaaatgattctctcaacatcttcaatagataccttgctattttttctggcattatctatatgtgcgagaatatcctctagagaatcagtatcctttttgatgatagtggatctcaatgacatgggacgtttaaaccttcttattctatcaccagattgcatggtgatttgtcttctttcttttatcataatgtaatctctaaattcatcggcaaattgtctatatctaaaatcataatatgagatgtttacctctacaaatatctgttcgtccaatgttagagtatttacatcagttttgtattccaaattaaacatggcaacggatttaattttatattcctctattaagtcctcgtcgataataacagaatgtagataatcatttaatccgtcgtacatggttggaagatgcttgttgacaaaatctttaattgtcttgatgaaggtgggactatatctaacatcttgattaataaaatttataacattgtccataggatactttgtaactagttttatacacatctcttcatcggtaagtttagacagaatatcgtgaacaggtggtatattatattcatcagatatacgaagaacaatgtccaaatctatattgtttaatatattatatagatgtagcgtagctcctacaggaatatctttaactaagtcaatgatttcatcaaccgttagatctattttaaagttaatcatataggcattgatttttaaaaggtatgtagccttgactacattctcattaattaaccattccaagtcattgtgtgtaagaagattatattctatcataagcttgactacatttggtcccgataccattaaagaattcttatgatataaggaaacagattttaggtactcatctactctacaagaattttggagagccttaacgatatcagtgacgtttattatttcaggaggaaagaatctaacattgagaatatcggaattaatagcttccagatacagtgattttggcaatagtccgtgtaatccataatccagtaacacgagctggtgcttgctagacaccttttcaatgtttaatttttttgaaataagctttgataaagccttcctcgcaaattccggatacatgaacatgtcggcgacatgattaagtattgttttttcattatttttatattttctcaacaagttctcaataccccaatagatgatagaatatcacccaatgcgtccatgttgtctatttccaacaggtcgctatatccaccaatagaagtttttccaaaaaagattctaggaacagttctaccaccagtaatttgttcaaaataatcccgcaattcattttcgggtttaaattctttaatatcgacaatttcatacgctcctcttttgaaactaaacttatttagaatatccagtgcatttctacaaaaaggacatgtatacttgacaaaaattgtcactttgttattggccaacctttgttgtacaaattcctcggccattttaatatttaagtgatataaaactatctcgacttatttaactctttagtcgagatatatggacgcagatagctatatgatagccaactacagaaggcaaacgctataaaaaacataattacgacgagcatatttataaatatttttattcagcattacttgatatagtaatattaggcacagtcaaacattcaaccactctcgatacattaactctctcattttctttaacaaattctgcaatatcttcgtaaaaagattcttgaaactttttagaatatctatcgactctagatgaaatagcgttcgtcaacatactatgttttgtatacataaaggcgcccattttaacagtttctagtgacaaaatgctagcgatcctaggatcctttagaatcacatagattgacgattcgtctctcttagtaactctagtaaaataatcatacaatctagtacgcgaaataatattatccttgacttgaggagatctaaacaatctagttttgagaacatcgataagttcatcgggaatgacatacatactatctttaatagaactcttttcatccagttgaatggattcgtccttaaccaactgattaatgagatcttctattttatcattttccagatgatatgtatgtccattaaagttaaattgtgtagcgcttctttttagtctagcagccaatactttaacatcactaatatcgatatacaaaggagatgatttatctatggcattaagaattcgtttttcgacatccgtcaaaaccaattcctttttgcctgtatcatccagttttccatcctttgtaaagaaattattttctactagactattaataagactgataaggattcctccataattgcacaatccaaactttttaacaaaactagactttacgagatctacaggaatgcgtacttcaggttttttagcttgtgattttttcttttgcggacattttctagtaaccaactcatctaccatttcattgattttagcagtgaaataagctttcaatgcacgggcactgatactattgaaaacgagttgatcttcaaattccgccatttaagttcaccaaacaacttttaaatacaaatatatcaatagtagtagaataagaactataaaaaaaataataattaaccaaccccaacaaccggtattattagttgatgtggtagttttctcatcacttagaacagatttaacaatttctataaagtctgtcaaatcatcttccggagaccccataaatacaccaaatatagcggcgtacaacttatccatttatacattgaatattggcttttctttatcgctatcttcatcatattcatcatcaatatcaacaagtcccagattacgagccagatcttcttctacattttcagtcattgatacacgttcactatctccagagagtccgataacgttagccaccacttctctatcaatgattagtttcttgagcgcgaaagtaatttttgtttccgttccggatctatagaagacgataggtgtgataattgccttggccaattgtctttctcttttactgagtgattctagttcaccttctatagatctgagaatggatgattctccagtcgaaacatattctaccatggatccgtttaatttgttgatgaagatggattcatccttaaatgttttctctgtaatagtttccaccgaaagactatgcaaagaatttggaatgcgttccttgtgcttaatgtttccatagacggcttctagaagttgatacaacataggactagccgcggtaacttttatttttagaaagtatccatcgcttctatcttgtttagatttatttttataaagtttagtctctccttccaacataataaaagtggaagtcatttgactagataaactatcagtaagttttatagagatagacgaacaattagcgtattgagaagcatttagtgtaacgtattcgatacattttgcattagatttactaatcgattttgcatactctataacacccgcacaagtctgtagagaatcgctagatgcagtaggtcttggtgaagtttcaactctcttcttgattaccttactcatgattaaacctaaataattgtactttgtaatataatgatatatattttcactttatctcatttgagaataaaaatgtttttgtttaaccactgcatgatgtacagatttcggaatcgcaaaccaccagtggttttattttatccttgtccaatgtgaattgaatgggagcggatgcgggtttcgtacgtagatagtacattcccgtttttagaccgagactccatccgtaaaaatgcatactcgttagtttggaataactcggatctgctatatggatattcatagattgactttgatcgatgaaggctcccctgtctgcagccatttttatgatcgtcttttgtggaatttcccaaatagttttataaactcgcttaatatcttctggaaggtttgtattctgaatggatccaccatctgccataatcctattcttgatctcatcattccataattttctctcggttaaaactctaaggagatgcggattaactacttgaaattctccagacaatactctccgagtgtaaatattactggtatacggttccaccgactcattatttcccaaaatttgagcagttgatgcagtcggcataggtgccaccaataaactatttctaagaccgtatgttctgattttatcttttagaggttcccaattccaaagatccgacggtacaacattccaaagatcatattgtagaataccgttactggcgtacgatcctacatatgtatcgtatggtccttccttctcagctagttcacaactcgcctctaatgcaccgtaataaatggtttcgaagatcttcttatttagatcttgtgcttccaggctatcaaatggataatttaagagaataaacgcgtccgctaatccttgaacaccaataccgataggtctatgtctcttattagagatttcagcttctggaataggataataattaatatctataattttattgagatttctgacaattactttgaccacatccttcagtttgagaaaatcaaatcgcccatctattacaaacatgttcaaggcaacagatgccagattacaaacggctacctcattagcatccgcatattgtattatctcagtgcaaagattactacacttgatagttcctaaattttgttgattactctttttgttacacgcatccttataaagaatgaatggagtaccagtttcaatctgagattctataatcgctttccagacgactcgagcctttattatagatttgtatctcctttctctttcgtatagtgtatacaatcgttcgaactcgtctccccaaacattgtccaatccaggacattcatccggacacatcaacgaccactctccgtcatccttcactcgtttcataaagagatcaggaatccaaagagctataaatagatctctggttctatgttcctcgtttcctgtattctttttaagatcgaggaacgccataatatcagaatgccacggttccaagtatatggccataactccaggccgtttgtttcctccctgatctatgtatctagcggtgttattataaactctcaacattggaataataccgtttgatataccattggtaccggagatatagcttccactggcacgaatattactaattgatagacctattccccctgccattttagagattaatgcgcatcgttttaacgtgtcatagataccctctatgctatcatcgatcatgttaagtagaaaacagctagacatttggtgacgactagttcccgcattaaataaggtaggagaagcgtgcgtaaaccatttttcagaaagtagattgtacgtctcaatagctgagtctatatcccattgatgaattcctactgcgacacgcattaacatgtgctgaggtctttcaacgatcttgttgtttattttcaacaagtaggatttttccaaagttttaaaaccaaaatagttgtatgaaaagtctcgttcgtaaataataaccgagttgagtttatccttatatttgttaactatatccatggtgatacttgaaataatcggagaatgtttcccatttttaggattaacatagttgaataaatcctccatcacttcactaaatagtttttttgtttccttgtgtagatttgatacggctattctggcggctagaatggcataatccggatgttgtgtagtacaagtggctgctatttcggctgccagagtgtccaattctaccgttgttactccattatatattccttgaataaccttcatagctattttaataggatctatatgatccgtgtttaagccataacataattttctaatacgagacgtgattttatcaaacatgacattttccttgtatccatttcgtttaatgacaaacatttttgttggtgtaataaaaaaattatttaacttttcattaatagggatttgacgtatgtagcgtacaaaatgattgttcctggtatatagataaagagtcctatatatttgaaaatcgttacggctcgattaaactttaatgattgcatagtgaatatatcattaggatttaactccttgactatcatggcggcgccagaaattaccatcaaaagcattaatacagttataccgatcgcagttagaacggttatagcatccaccatttatatctaaaaattagatcaaagaatatgtgacaaagtcctagttgtatactgagaattgacgaaacaatgtttcttacatatttttttcttattagtaaccgacttaatagtaggaactggaaaactagacttgattattctataagtatagatacccttccaaataatattctctttgataaaagttccagaaaatgtagaattttttaaaaagttatcttttgctattaccaagattgtgtttagacgcttattattaatatgagtgatgaaatccacaccgcctctagatatcgcctttatttccacattagatggtaaatccaatagtgaaactatctttttaggaatgtatggactcgcgtttagaggagtaaacgtcttaggcgtcggaaaggatgattcatcaaacgaataaacaatttcacaaatggatgttaatgtattagtaggaaattttttgacgctattggaattgaagattctaatggatgatgttctacctatttcatccgataacatgttaatttccgacaccaacggttttaatatttcgatgatatacggtagtctctctttcggacttatatagcttattccacaatacgagtcattatatactccaaaaaacaaaataactagtataaaatctgtatcgaatgggaaaaacgaaattatcgacataggtatagaatccggaacattgaacgtattaatacttaattctttttctgtggtaagtaccgataggttattgacattgtatggttttaaatattctataacttgagacttgatagatattagtgatgaattgaaaattatttttatcaccacgtgtgtttcaggatcatcgtcgacgcccgtcaaccaaccgaacggagtaaaataaatatcattaatatatgctctagatattagtatttttatcaatcctttgattatcatcttctcgtaggcgaatgattccatgatcaagagtgatttaagaacatcctccggagtattaatgggcttagtaaacagtccatcgttgcaataataaaagttatccaagttaaaggatattatgcattcgtttaaagatatcacctcatctgacggagacaattttttggtaggttttagagactttgaagctacttgtttaacaaagttattcatcgtcgtctactattctatttaattttgtagttaatttatcacatatcacattaattgactttttggtccacttttccatacgtttatattcttttaatcctgcgttatccgtttccgttatatccagggatagatcttgcaagttaaatagaatgctcttaaataatgtcattttcttatccgctaaaaatttaaagaatgtataaacctttttcagagatttgaaactcttaggtggtgtcctagtacacaatatcataaacaaactaataaacattccacattcagattccaacagctgattaacttccacattaatacagcctattttcgctccaaatgtacattcgaaaaatctgaataaaacatcgatgtcacaatttgtattatccaatacagaatgtttgtgattcgtgttaaaaccatcggagaaggaatagaaataaaaattattatagtggtggaattcagttggaatattgcctccggagtcataaaaggatactaaacattgttttttatcataaattacacatttccaatgagacaaataacaaaatccaaacattacaaatctagaggtagaacttttaattttgtctttaagtatatacgataagatatgtttattcataaacgcgtcaaatttttcatgaatcgctaaggagtttaagaatctcatgtcaaattgtcctatataatccacttcggatccataagcaaactgagagactaagttcttaatacttcgattgctcatccaggctcctctctcaggctctattttcatcttgacgacctttggattttcaccagtatgtattcctttacgtgataaatcatcgattttcaaatccatttgtgagaagtctatcgccttagatactttttcccgtagtcgaggtttaaaaaaatacgctaacggtatactagtaggtaactcaaagacatcatatatagaatggtaacgcgtctttaactcgtcggttaactctttcttttgatcgagttcgtcgctactattgggtctgctcaggtgccccgactctactagttccaacatcataccgataggaatacaagacactttgccggcggttgtagatttatcatatttttccactacatatccgttacaatttgttaaaaatttagatacatctatattgctacataatccagctagtgaatatatatgacataataaattggtaaatcctagttctggtattttactaattactaaatctgtatatctttccatttatcatggaaaagaatttaccagatatcttcttttttccaaactgcgttaatgtattctcttacaaatattcacaagatgaattcagtaatatgagtaaaacggaacgtgatagtttctcattggccgtgtttccagttataaaacatagatggcataacgcacacgttgtaaaacataaaggaatatacaaagttagtacagaagcacgtggaaaaaaagtatctcctccatcactaggaaaacccgcacacataaacctaaccgcgaagcaatatatatacagtgaacacacaataagctttgaatgttatagttttctaaaatgtataacaaatacagaaatcaattcgttcgatgagtatatattaagaggactattagaagctggtaatagtttacagatattttccaattccgtaggtaaacgaacagatactataggtgtactagggaataagtatccatttagcaaaattccattggcctcattaactcctaaagcacaacgagagatattttcagcgtggatttctcatagacctgtagttttaactggaggaactggagtgggtaagacgtcacaggtacccaagttattgctttggtttaattatttatttggtggattctctactctagataaaatcactgactttcacgaaagaccagtcattctatctcttcctaggatagctttagttagattgcatagcaataccattttaaaatcattgggatttaaggtactagatggatctcctatttctttacggtacggatctataccggaagaattaataaacaaacaaccaaaaaaatatggaattgtattttctacccataagttatctctaacaaaactatttagttatggcactcttattatagacgaagttcatgagcatgatcaaataggagatattattatagcagtagcgagaaagcatcatacgaaaatagattctatgtttttaatgactgccacgttagaggatgacagggaacggctaaaagtatttttacctaatcccgcatttatacatattcctggagatacactgtttaaaattagcgaggtatttattcataataagataaatccatcttccagaatggcatacatagaagaagaaaagagaaatttagttactgctatacagatgtatactcctcctgatggatcatccggtatagtctttgtggcatccgttgcacagtgtcacgaatataaatcatatttagaaaaaagattaccgtatgatatgtatattattcatggtaaggtcttagatatagacgaaatattagaaaaagtgtattcatcacctaatgtatcgataattatttctactccttatttggaatccagcgttactatacgcaatgttacacacatttatgatatgggtagagtttttgtccccgctccttttggaggatcgcaacaatttatttctaaatctatgagagatcaacgaaaaggaagagtaggaagagttaatcctggtacatacgtctatttctatgatctgtcttatatgaagtctatacagcgaatagattcagaatttctacataattatatattgtacgctaataagtttaatctaacactccccgaagatttgtttataatccctacaaatttggatattctatggcgtacaaaggaatatatagactcgttcgatattagtacagaaacatggaataaattattatccaattattatatgaagatgatagagtatgctaaactttatgtactaagtcctattctcgctgaggagttggataactttgagaggacgggagaattaactagtattgtacgagaagccattttatctctaaatttacaaattaagattttaaattttaaacataaagatgatgatacgtatatacacttttgtaaaatattattcggtgtctataacggaacaaacgctactatatattatcatagacctctaacgggatatatgaatatgatttcagatactatatttgttcctgtagataataactaaaaatcaaactctaatgaccacatctttttttagagatgaaaaattttccacatctccttttgtagacacgactaaacattttgcagaaaaaagtttattagtgtttagataatcgtatacttcatcagtgtagatagtaaatgtgaacagataaaaggtattcttgctcaatagattggtaaattccatagaatatattaatcctttcttcttgagatcccacatcatttcaaccagagacgttttatccaatgatttacctcgtactataccacatacaaaactagattttgcagtgacgtcgtacctggtattcctaccaaacaaaattttacttttagttcttttagaaaattctaaggtagaatctctatttgccaatatgtcatctatggaattaccactagcaaaaaatgatagaaatatatattgatacatcgcagctggttttgatctactatactttaaaaacgaatcagattccataattgcctgtatatcatcagctgaaaaactatgttttacacgtattccttcggcatttctttttaatgatatatcttgtttagacaatgataaagttatcatgtccatgagagacgcgtctccgtatcgtataaatatttcattagatgttagacgcttcattaggggtatacttctataaggtttcttaatcagtccatcattggttgcgtcaagaactactatcggatgttgttgggtatctctagtgttacacatggccttactaaagtttgggtaaataactatgatatctctattaattatagatgcatatatttcattcgtcaaggatattagtatcgacttgctatcgtcattaatacgtgtaatgtaatcatataaatcatgcgatagccaaggaaaatttaaatagatgttcatcatataatcgtcgctataattcatattaatacgttgacattgactaatttgtaatatagcctcgccacgaagaaagctctcgtattcagtttcatcgataaaggataccgttaaatataactggttgccgatagtctcatagtctattaagtggtaagtttcgtacaaatacagaatccctaaaatattatctaatgttggattaatctttaccataactgtataaaatggagacggagtcataactattttaccgtttgtacttactggaatagatgaaggaataatctccggacatgctggtaaagacccaaatgtctgtttgaagaaatccaatgttccaggtcctaatctcttaacaaaaattacgatattcgatcccgatatcctttgcattctatttaccagcatatcacgaactatattaagattatctatcatgtctattctcccaccgttatataaatcgcctccgctaagaaacgttagtatatccatacaatggaatacttcatttctaaaatagtattcgttttctaattctttaatgtgaaatcgtatactagaaagggaaaaattatctttgagttttccgttagaaaagaaccacgaaactaatgttctgattgcgtccgattccgttgctgaattaatggatttacaccaaaaactcatataacttctagatgtagaagcattcgctaaaaaattagtagaatcaaaggatataagtagatgttccaacaagtgagcaattcccaagatttcatctatatcattctcgaatccgaaattagaaattcccaagtagatatcctttttcatccgatcgttgatgaaaatacgaactttattcggtaagacaatcatttactaaggagtaaaataggaagtaatgttcgtatgtcgttatcatcgtataaattaaaggtgtgttttttaccattaagtgacattataattttaccaatattggaattataatataggtgtatttgcgcactcgcgacggttgatgcatcggtaaatatagctgtatctaatgttctagtcggtatttcatcatttcgctgtctaataatagcgttttctctatctgtttccattacagctgcctgaagtttattggtcggataatatgtaaaataataagaaatacatacgaataacaaaaataaaataagatataataaagatgccatttagagatctaattttgtttaacttgtccaaattcctacttacagaagatgaggaatcgttggagatagtgtcttccttatgtagaggatttgaaatatcttataatgacttgataacttactttccagataggaaataccataaatatatttataaagtatttgaacatgtagatttatcggaggaattaagtatggaattccatgatacaactctgagagatttagtctatcttagattgtacaagtattccaagtgtatacggccgtgttataaattaggagataatctaaaaggcatagttgttataaaggacaggaatatttatattagggaagcaaatgatgacttgatagaatatctcctcaaggaatacactcctcagatttatacatattctaatgagcgcgtccccataactggttcaaaattaattctttgtggattttctcaagttacatttatggcgtatacaacgtcgcatataacaacaaataaaaaggtagatgttctcgtttccaaaaaatgtatagatgaactagtcgatccaataaattatcaaatacttcaaaatttatttgataaaggaagcggaacaataaacaaaatactcaggaagatattttattcggtaacaggtggccaaactccataggtagctttttctatttcggattttagaatttccaaattcaccagcgatttatcggttttggtgaaatccaaggatttattaatgtccacaaatgccatttgttttgtctgtggattgtatttgaaaatggaaacgatgtagttagatagatgcgctgcgaagtttcctattagggttccgcgcttcacgtcacccagcatacttgaatcaccatcctttaaaaaaaatgataagatatcaacatggagtatatcatactcgaattttaattcttctactgactcactgacattttcacaaatactacaatacggtttaccgaaaataatcagtacgttcttcatttatgggtatcaaaaacttaaaatcgttactgctggaaaataaatcactgacgatattagatgataatttatacaaagtatacaatggaatatttgtggatacaatgagtatttatatagccgtcgccaattgtgtcagaaacttagaagagttaactacggtattcataaaatacgtaaacggatgggtaaaaaagggagggcatgtaaccctttttatcgatagaggaagtataaaaattaaacaagacgttagagacaagagacgtaaatattctaaattaaccaaggacagaaaaatgttagaattagaaaagtgtacatccgaaatacaaaatgttaccggatttatggaagaagaaataaaggcagaaatgcaattaaaaatcgataaactcacatttcaaatatatttatctgattctgataacataaaaatatcattgaatgagatactaacacatttcaacaataatgagaatgttacattattttattgtgatgaacgagacgcagaattcgttatgtgtctcgaggctaaaacacatttctctaccacaggagaatggccgttgataataagtaccgatcaggatactatgctatttgcatctgctgataatcatcctaagatgataaaaaacttaactcaactgtttaaatttgttccctcggcagaggataactatttagcaaaattaacggcgttagtgaatggatgtgatttctttcctggactctatggggcatctataacacccaccaacttaaacaaaatacaattgtttagtgattttacaatcgataatatagtcactagtttggcaattaaaaattattatagaaagactaactctaccgtagacgtgcgtaatattgttacgtttataaacgattacgctaatttagacgatgtctactcgtatattcctccttgtcaatgcactgttcaagaatttatattttccgcattagatgaaaaatggaatgaatttaaatcatcttatttagaaagcgtgccgttaccctgccaattaatgtacgcgttagaaccacgcaaggagattgatgtttcagaagttaaaactttatcatcttatatagatttcgaaaatactaaatcagatatcgatgttataaaatctatatcctcgatcttcggatattctaacgaaaactgtaacacgatagtattcggcatctataaggataatttactactgagtataaataattcattttactttaacgatagtctgttaataaccaatactaaaagtgataatataataaatataggttactagattaaaaatggtgttccaactcgtgtgctctacatgcggtaaagatatttctcacgaacgatataaattgattatacgaaaaaaatcattaaaggatgtactcgtcagtgtaaagaacgaatgttgtaggttaaaattatctacacaaatagaacctcaacgtaacttaacagtgcaacctctattggatataaactaatatggatccggttaattttatcaagacatatgcgcctagaggttctattatttttattaattataccatgtcattaacaagtcatttgaatccatcgatagaaaaacatgtgggtatttattatggtacgttattatcggaacacttggtagttgaatctacctatagaaaaggagttcgaatagtcccattggatagtttttttgaaggatatcttagtgcaaaagtatacatgttagagaatattcaagttatgaaaatagcagctgatacgtcattaactttattgggtattccgtatggatttggtcatgatagaatgtattgttttaaattggtagctgactgttataaaaatgccggtattgatacatcgtctaaacgaatattgggcaaagatatttttctgagccaaaacttcacagacgataatagatggataaagatatatgattctaataatttaacattttggcaaattgattaccttaaagggtgagttaatatgcataactactcctccgttgttttttccctcgttctttttcttaacgttgtttgccatcactctcataatgtaaagatattctaaaatggtaaacttttgcatatcggacgcagaaattggtataaatgttgtaattgtattatttcccgtcaatggactagtcacagctccatcagttttatatcctttagagtatttctcactcgtgtctaacattctagagcattccatgatctgtttatcgttgatattggccggaaagatagattttttattttttattatattactattggcaattgtagatataacttctggtaaatatttttctaccttttcaatctcttctattttcaagccggctatatattctgctatattgttgctagtatcaataccttttctggctaagaagtcatatgtggtattcactatatcagttttaactggtagttccattagcctttccacttctgcagaataatcagaaattggttctttaccagaaaatccagctactataataggctcaccgatgatcattggcaaaatcctatattgtaccagattaatgagagcatatttcatttccaataattctgctagttcttgagacattgatttatttgatgaatctagttggttctctagatactctaccatttctgccgcatacaataacttgttagataaaatcagggttatcaaagtgtttagcgtggctagaatagtgggcttgcatgtattaaagaatgcggtagtatgagtaaaccgttttaacgaattatatagtctccagaaatctgtggcgttacatacatgagccgaatgacatcgaagattgtccaatatttttaatagctgctctttgtccattatttctatatttgactcgcaacaattgtagataccattaatcaccgattcctttttcgatgccggacaatagcacaattgtttagctttggactctatgtattcagaattaatagatatatctctcaatacagattgcactatacattttgaaactatgtcaaaaattgtagaacgacgctgttctgcagccatttaactttaaataatttacaaaaatttaaaatgagcatccgtataaaaatcgataaactgcgccaaattgtggcatatttttcagagttcagtgaagaagtgtctataaatgtagactcgacggatgagttaatgtatatttttgccgccttgggcggatctgtaaacatttgggcaattatacctctaagtgcatcagtgttttaccgaggagccgaaaatattgtgtttaatcttcctgtgtccaaggtaaaatcgtgtttgtgtagttttcacaatgatgccatcatagatatagaacctgatctggaaaataatctagtaaaactttctagttatcatgtagtaagtgtcgattgtaacaaggaactgatgcctattaggacagatactactatttgtctaagtatagatcaaaagaaatcttacgtgtttaattttcacaagtatgaagaaaaatgttgtggtagaaccgtcattcatctagaatggttgttgggctttatcaagtgtattagtcagcatcagcatctggctattatgtttaaagatgacaatattattatgaagactcctggtaatactgatgcgttttccagggaatattctatgactgaatgttctcaagaactacaaaagttttctttcaaaatagctatctcgtctctcaacaaactacgaggattcaaaaagagagtcaatgtttttgaaactagaatcgtaatggataatgacgataacattttaggaatgttgttttcggatagagttcaatcctttaagatcaacatctttatggcgtttttagattaatactttcaatgagataaatatgggtggcggagtaagtgttgagctccctaaacgggatccgcctccgggagtacccactgatgagatgttattaaacgtggataaaatgcatgacgtgatagctcccgctaagcttttagaatatgtgcatataggaccactagcaaaagataaagaggataaagtaaagaaaagatatccagagtttagattagtcaacacaggacccggtggtctttcggcattgttaagacaatcgtataatggaaccgcacccaattgctgtcgcacttttaatcgtactcattattggaagaaggatggaaagatatcagataagtatgaagagggtgcagtattagaatcgtgttggccagacgttcacgacactggaaaatgcgatgttgatttattcgactggtgtcagggggatacgttcgatagaaacatatgccatcagtggatcggttcagcctttaataggagtaatagaactgtagagggtcaacaatcgttaataaatctgtataataagatgcaaacattatgtagtaaagatgctagtgtaccaatatgcgaatcatttttgcattatttacgcgcacacaatacagaagatagcaaagagatgatcgattatattctaagacaacagtctgcggactttaaacagaaatatatgagatgtagttatcccactagagataagttagaagagtcattaaaatatgcggaacctcgagaatgttgggatccagagtgttcgaatgccaatgttaatttcttactaacacgtaattataataatttaggactttgcaatattgtacgatgtaataccagcgtgaacaacttacagatggataaaacttcctcattaagattgtcatgtggattaagcaatagtgatagattttctactgttcccgtcaatagagcaaaagtagttcaacataatattaaacactcgttcgacctaaaattgcatttgatcagtttattatctctcttggtaatatggatactaattgtagctatttaaatgggtgccgcggcaagcatacagacgacggtgaatacactcagcgaacgtatctcgtctaaattagaacaagaagcgaacgctagtgctcaaacaaaatgtgatatagaaatcggaaatttttatatccgacaaaaccatggatgtaacctcactgttaaaaatatgtgctctgcggacgcggatgctcagttggatgctgtgttatcagccgctacagaaacatatagtggattaacaccggaacaaaaagcatacgtgccagctatgtttactgctgcgttaaacattcagacgagtgtaaacactgttgttagagattttgaaaattatgtgaaacagacttgtaattctagcgcggtcgtcgataacaaattaaagatacaaaacgtaatcatagatgaatgttacggagccccaggatctccaacaaatttggaatttattaatacaggatctagcaaaggaaattgtgccattaaagcgttgatgcaattgacgactaaggccactactcaaatagcacctagacaagttgctggtacaggagttcagttttatatgattgttatcggtgttataatattggcagcgttgtttatgtactatgccaagcgtatgttgttcacatccaccaatgataaaatcaaacttattttagccaataaggaaaacgtccattggactacttacatggacacattctttagaacttctccgatggttattgctaccacggatatgcaaaactgaaaatatattgataatattttaatagattaacatggaagttatcgctgatcgtctagacgatatagtgaaacaaaatatagcggatgaaaaatttgtagattttgttatacacggtctagagcatcaatgtcctgctatacttcgaccattaattaggttgtttattgatatactattatttgttatagtaatttatatttttacggtacgtctagtaagtagaaattatcaaatgttgttggtggtgctagtcatcacattaactattttttattactttatactataatagtactagactgacttctaacaaacatctcacctgccataaataaatgcttgatattaaagtcttctatttctaacactattccatctgtggaaaataatactctgacattatcgctaattgacacatcggtgagtgatatgcctataaagtaataatcttctttgggcacatataccagtgtaccaggttctaacaacctatttactggtgctcctgtagcatactttttctttaccttgagaatatccatcgtttgcttggtcaatagcgatatgtgattttttatcaaccactcaaaaaagtaattggagtgttcatatcctctacgggctattgtctcatggccgtgtatgaaatttaagtaacacgactgtggtagatttgttctatagagccgattgccgcaaatagatagaactaccaatatgtctgtacaaatgttaaacattaattgattaacagaaaaaacaatgttcgttctgggaatagaaaccagatcaaaacaaaattcgttagaatatatgccacgtttatacatggaatataaaataactacagtttgaaaaataacagtatcatttaaacatttaacttgcggggttaatctcacaactttactgtttttgaactgttcaaaatatagcatcgatccgtgagaaatacgtttagccgcctttaatagaggaaatcccaccgcctttctggatctcaccaacgacgatagttctgaccagcaactcatttcttcatcatccacctgttttaacatataataggcaggagatagatatccgtcattgcaatattccttctcgtaggcacacaatctaatattgataaaatctccattctcttctctgcatttattatcttgtctcggtggctgattaggctgtggtcttggtttaggccttggtctatcgttgttgaatctattttggtcattaaatctttcatttcttcctggtatatttctatcacctcgtttggttggatttttgtctatattatcgtttgtaacatcggtacgggtattcatttatcacaaaaaaaacttctctaaatgagtctactgctagaaaacctcatcgaagaagataccatattttttgcaggaagtatatctgagtatgatgatttacaaatggttattgccggcgcaaaatccaaatttccaagatctatgctttctatttttaatatagtacctagaacgatgtcaaaatatgagttggagttgattcataacgaaaatatcacaggagcaatgtttaccacaatgtataatataagaaacaatttgggtctaggagatgataaactaactattgaagccattgaaaactatttcttggatcctaacaatgaagttatgcctcttattattaataatacggatatgactgccgtcattcctaaaaaaagtggtaggagaaagaataagaacatggttatcttccgtcaaggatcatcacctatcttgtgcattttcgaaactcgtaaaaagattaatatttataaagaaaatatggaatccgcgtcgactgagtatacacctatcggagacaacaaggctttgatatctaaatatgcgggaattaatgtcctgaatgtgtattctccttccacatccataagattgaatgccatttacggattcaccaataaaaataaactagagaaacttagtactaataaggaactagaatcgtatagttctagccctcttcaagaacccattaggttaaatgattttctgggactattggaatgtgttaaaaagaatattcctctaacagatattccgacaaaggattgattactataaatggagaatgttcctaatgtatactttaatcctgtgtttatagagcccacgtttaaacattctttattaagtgtttataaacacagattaatagttttatttgaagtattcgttgtattcattctaatatatgtattttttagatctgaattaaatatgttcttcatgcctaaacgaaaaatacccgatcctattgatagattacgacgtgctaatctagcgtgtgaagacgataaattaatgatctatggattaccatggatgacaactcaaacatctgcgttatcaataaatagtaaaccgatagtgtataaagattgtgcaaagcttttgcgatcaataaatggatcacaaccagtatctcttaacgatgttcttcgcagatgatgattcattttttaagtatttggctagtcaagatgatgaatcttcattatctgatatattgcaaatcactcaatatctagactttctgttattattattgatccaatcaaaaaataaattagaagctgtgggtcattgttatgaatctctttcagaggaatacagacaattgacaaaattcacagactttcaagattttaaaaaactgtttaacaaggtccctattgttacagatggaagggtcaaacttaataaaggatatttgttcgactttgtgattagtttgatgcgattcaaaaaagaatcctctctagctaccaccgcaatagatcctgttagatacatagatcctcgtcgcaatatcgcattttctaacgtgatggatatattaaagtcgaataaagtgaacaataattaattctttattgtcatcatgaacggcggacatattcagttgataatcggccccatgttttcaggtaaaagtacagaattaattagacgagttagacgttatcaaatagctcaatataaatgcgtgactataaaatattctaacgataatagatacggaacgggactatggacgcatgataagaataattttgaagcattggaagcaactaaactatgtgatgtcttggaatcaattacagatttctccgtgataggtatcgatgaaggacagttctttccagacattgtttaattctgtgagcgtatggcaaacggtaccgagctcttttttttttttttttttttggcatataaataagtcgactccctatcagtgatagagaatggtgaagcgtgagaaaaatgtcatctatggccctgagcctctccatcctttggaggatttgactgccggcgaaatgctgtttcgtgctctccgcaagcactctcatttgcctcaagccttggtcgatgtggtcggcgatgaatctttgagctacaaggagttttttgaggcaaccgtcttgctggctcagtccctccacaattgtggctacaagatgaacgacgtcgttagtatctgtgctgaaaacaatacccgtttcttcattccagtcatcgccgcatggtatatcggtatgatcgtggctccagtcaacgagagctacattcccgacgaactgtgtaaagtcatgggtatctctaagccacagattgtcttcaccactaagaatattctgaacaaagtcctggaagtccaaagccgcaccaactttattaagcgtatcatcatcttggacactgtggagaatattcacggttgcgaatctttgcctaatttcatctctcgctattcagacggcaacatcgcaaactttaaaccactccacttcgaccctgtggaacaagttgcagccattctgtgtagcagcggtactactggactcccaaagggagtcatgcagacccatcaaaacatttgcgtgcgtctgatccatgctctcgatccacgcgtgggcactcagctgattcctggtgtcaccgtcttggtctacttgcctttcttccatgctttcggctttagcattactttgggttactttatggtcggtctccgcgtgattatgttccgccgttttgatcaggaggctttcttgaaagccatccaagattatgaagtccgcagtgtcatcaacgtgcctagcgtgatcctgtttttgtctaagagcccactcgtggacaagtacgacttgtcttcactgcgtgaattgtgttgcggtgccgctccactggctaaggaggtcgctgaagtggccgccaaacgcttgaatcttccagggattcgttgtggcttcggcctcaccgaatctaccagcgctaacattcactctctcggggatgagtttaagagcggctctttgggccgtgtcactccactcatggctgctaagatcgctgatcgcgaaactggtaaggctttgggcccgaaccaagtgggcgagctgtgtatcaaaggccctatggtgagcaagggttatgtcaataacgttgaagctaccaaggaggccatcgacgacgacggctggttgcattctggtgattttggatattacgacgaagatgagcatttttacgtcgtggatcgttacaaggagctgatcaaatacaagggtagccaggttgctccagctgagttggaggagattctgttgaaaaatccatgcattcgcgatgtcgctgtggtcggcattcctgatctggaggccggcgaactgccttctgctttcgttgtcaagcagcctggtaaagaaattaccgccaaagaagtgtatgattacctggctgaacgtgtgagccatactaagtacttgcgtggcggcgtgcgttttgttgactccatccctcgtaacgtaacaggcaaaattacccgcaaggagctgttgaaacaattgttggagaaggccggcggtggttccggagccacgaacttctctctgttaaagcaagcaggagacgtggaagaaaaccccggtcccatggcctcctccgaggacgtcatcaaggagttcatgcgcttcaaggtgcgcatggagggctccgtgaacggccacgagttcgagatcgagggagagggcgagggccgcccctacgagggcacccagaccgccaagctgaaggtgaccaagggcggccccctgcccttcgcctgggacatcctgtcccctcagttccagtacggctccaaggcctacgtgaagcaccccgccgacatccccgactacttgaagctgtccttccccgagggcttcaagtgggagcgcgtgatgaacttcgaggacggcggcgtggtgaccgtgacccaggactcctccctgcaggacggcgagttcatctacaaggtgaagctgcgcggcaccaacttcccctccgacggccccgtaatgcagaagaagaccatgggctgggaggcctccaccgagcggatgtaccccgaggacggcgccctgaagggcgagatcaagatgaggctgaagctgaaggacggcggccactacgacgccgaggtcaagaccacctacatggccaagaagcccgtgcagctgcccggcgcctacaagaccgacatcaagctggacatcacctcccacaacgaggactacaccatcgtggaacagtacgagcgcgccgagggccgccactccaccggcgcctaattaattaatttttatcgatctaattcaacaatgtctggagagctcggatccttctgtgagcgtatggcaaacgaaggaaaaatagttatagtagccgcactcgatgggacatttcaacgtaaaccgtttaataatattttgaatcttattccattatctgaaatggtggtaaaactaactgctgtgtgtatgaaatgctttaaggaggcttccttttctaaacgattgggtgaggaaaccgagatagaaataataggaggtaatgatatgtatcaatcggtgtgtagaaagtgttacatcgactcataatattatattttttatctaaaaaactaaaaataaacattgattaaattttaatataatacttaaaaatggatgttgtgtcgttagataaaccgtttatgtattttgaggaaattgataatgagttagattacgaaccagaaagtgcaaatgaggtcgcaaaaaaactgccgtatcaaggacagttaaaactattactaggagaattattttttcttagtaagttacagcgacacggtatattagatggtgccaccgtagtgtatataggatctgctcccggtacacatatacgttatttgagagatcatttctataatttaggagtgatcatcaaatggatgctaattgacggccgccatcatgatcctattttaaatggattgcgtgatgtgactctagtgactcggttcgttgatgaggaatatctacgatccatcaaaaaacaactgcatccttctaagattattttaatttctgatgtgagatccaaacgaggaggaaatgaacctagtacggcggatttactaagtaattacgctctacaaaatgtcatgattagtattttaaaccccgtggcgtctagtcttaaatggagatgcccgtttccagatcaatggatcaaggacttttatatcccacacggtaataaaatgttacaaccttttgctccttcatattcagctgaaatgagattattaagtatttataccggtgagaacatgagactgactcgagttaccaaattagacgctgtaaattatgaaaaaaagatgtactaccttaataagatcgtccgtaacaaagtagttgttaactttgattatcctaatcaggaatatgactattttcacatgtactttatgctgaggaccgtgtactgcaataaaacatttcctactactaaagcaaaggtactatttctacaacaatctatatttcgtttcttaaatattccaacaacatcaactgaaaaagttagtcatgaaccaatacaacgtaaaatatctagcaaaaattctatgtctaaaaacagaaatagcaagagatccgtacgcggtaataaatagaaacgtactactgagatatactaccgatatagagtataatgatttagttactttaataaccgttagacataaaattgattctatgaaaactgtgtttcaggtatttaacgaatcatccataaattatactccggttgatgatgattatggagaaccaatcattataacatcgtatcttcaaaaaggtcataacaagtttcctgtaaattttctatacatagatgtggtaatatctgacttatttcctagctttgttagactagatactacagaaactaatatagttaatagtgtactacaaacaggcgatggtaaaaagactcttcgtcttcccaaaatgttagagacggaaatagttgtcaagattctctatcgccctaatataccattaaaaattgttagatttttccgcaataacatggtaactggagtagagatagccgatagatctgttatttcagtcgctgattaatcaattagtagagatgagataagaacattataataatcaataatatatcttatatcttatatcttatatcttatatcttgtttagaaaaatgctaatattaaaatagctaacgctagtaatccaatcggaagccatttgatatctataatagggtatctaatttcctgatttaaatagcggacagctatattctcggtagctactcgtttggaatcacaaacattatttacatctaatttactatctgtaatggaaacgtttcccaatgaaatggtacaatccgatacattgcattttgttatatttttttttaaagaggctggtaacaacgcatcgcttcgtttacatggctcgtaccaacaataatagggtaatcttgtatctattcctatccgtactatgcttttatcaggataaatacatttacatcgtatatcgtctttgttagcatcacagaatgcataaatttgttcgtccgtcatgataaaaatttaaagtgtaaatataactattatttttatagttgtaataaaaagggaaatttgattgtatactttcggttctttaaaagaaactgacttgataaaaatggctgtaatctctaaggttacgtatagtctatatgatcaaaaagagattaatgctacagatattatcattagtcatgttaaaaatgacgacgatatcggtaccgttaaagatggtagactaggtgctatggatggggcattatgtaagacttgtgggaaaacggaattggaatgtttcggtcactggggtaaagtaagtatttataaaactcatatagttaagcctgaatttatttcagaaattattcgtttactgaatcatatatgtattcactgcggattattgcgttcacgagaaccgtattccgacgatattaacctaaaagagttatcgggacacgctcttaggagattaaaggataaaatattatccaagaaaaagtcatgttggaacagtgaatgtatgcaaccgtatcaaaaaattactttttcaaagaaaaaggtttgtttcgtcaacaagttggatgatattaacgttcctaattctctcatctatcaaaagttaatttctattcatgaaaagttttggccattattagaaattcatcaatatccagctaacttattttatacagactactttcccatccctccgttgattattagaccggctattagtttttggatagatagtatacccaaagagaccaatgaattaacttacttattaggtatgatcgttaagaattgtaacttgaatgctgatgaacaggttatccagaaggcggtaatagaatacgatgatattaaaattatttctaataacactaccagtatcaatttatcatatattacatccggcaaaaataatatgattagaagttatatcgtcgcccgacgaaaagatcagaccgctagatctgtaattggtcccagtacatctatcaccgttaatgaggtaggaatgcccgcatatattagaaatacacttacagaaaagatatttgttaatgcctttacagtggataaagttaaacaactattagcgtcaaaccaagttaaattttactttaataaacgattaaaccaattaacaagaatacgccaaggaaagtttattaaaaataaaatacatttattgcctggtgattgggtagaagtagctgttcaagaatatacaagtattatttttggaagacagccgtctctacatagatacaacgtcatcgcttcatctatcagagctaccgaaggagatactatcaaaatatctcccggaattgccaactctcaaaatgctgatttcgacggggatgaggaatggatgatattagaacaaaatcctaaagctgtaattgaacaaagtattcttatgtatccgacgacgttactcaaacacgatattcatggagcccccgtttatggatctattcaagatgaaatcgtagcagcgtattcattgtttaggatacaagatctttgtttagatgaagtattgaacatcttggggaaatatggaagagagttcgatcctaaaggtaaatgtaaattcagcggtaaagatatctatacttacttgataggtgaaaagattaattatccgggtctcttaaaggatggtgaaattattgcaaacgacgtagatagtaattttgttgtggctatgaggcatctgtcattggctggactcttatccgatcataagtcgaacgtggaaggtatcaactttattatcaagtcatcttatgtttttaagagatatctatctatttacggttttggggtgacattcaaagatctgagaccaaattcgacgttcactaataaattggaggccatcaacgtagaaaaaatagaacttatcaaagaagcatacgccaaatatctcaacgatgtaagagacgggaaaatagttccattatctaaagctttagaggcggactatgtggaatccatgttatccaacttgacaaatcttaatatccgagagatagaagaacatatgagacaaacgctgatagatgatccagataataacctcctgaaaatggccaaagcgggttataaagtaaatcccacagaactaatgtatattctaggtacgtatggacaacaaaggattgatggtgaaccagcagagactcgagtattgggtagagttttaccttactatcttccagactctaaggatccagaaggaagaggttacattcttaattctttaacaaaaggattaacgggttctcaatattacttttcgatgctggttgccagatctcaatctactgatatcgtctgtgaaacatcacgtaccggaacactggctagaaaaatcattaaaaagatggaggatatggtggtcgacggatacggacaagtagttataggtaatacgctcatcaagtacgccgccaattataccaaaattctaggctcagtatgtaaacctgtagatcttatctatccagatgagtccatgacttggtatttggaaattagtgctctgtggaataaaataaaacagggattcgtttactctcagaaacagaaacttgcaaagaagacattggcgccgtttaatttcctagtattcgtcaaacccaccactgaggataatgctattaaggttaaggatctgtacgatatgattcataacgtcattgatgatgtgagagagaaatacttctttacggtatctaatatagattttatggagtatatattcttgacgcatcttaatccttctagaattagaattacaaaagaaacggctatcactatctttgaaaagttctatgaaaaactcaattatactctaggtggtggaactcctattggaattatttctgcacaggtattgtctgagaagtttacacaacaagccctgtccagttttcacactactgaaaaaagtggtgccgtcaaacaaaaacttggtttcaacgagtttaataacttgactaatttgagtaagaataagaccgaaattatcactctggtatccgatgatatctctaaacttcaatctgttaagattaatttcgaatttgtatgtttgggagaattaaatccaaacatcactcttcgaaaagaaacagataaatatgtagtagatataatagtcaatagattatacatcaagagagcagaaataaccgaattagtcgtcgaatatatgattgaacgatttatctcctttagcgtcattgtaaaggaatggggtatggagacattcattgaggacgaggataatattagatttactgtctacctaaatttcgttgaaccggaagaattgaatcttagtaagtttatgatggttcttccgggggcagccaacaagggaaagattagtaaattcaagattcctatctctgattatacgggatatgacgacttcaatcaaacaaaaaagctcaataagatgactgtagaactcatgaatctaaaagaattgggttctttcgatttggaaaacgtcaacgtgtatcctggagtatggaatacatacgatatcttcggtatcgaggccgctcgtgaatacttgtgcgaagccatgttaaacacctatggagaagggttcgattatctgtatcagccttgtgatcttctcgctagtttactatgtgctagttacgaaccagaatcagtgaataaattcaagttcggcgcagctagtactcttaagagagctacgttcggagacaataaagcattgttaaacgcggctcttcataaaaagtcagaacctattaacgataatagtagctgccacttttttagcaaggtccctaatataggaactggatattacaaatactttatcgacttgggtcttctcatgagaatggaaaggaaactatctgataagatatcttctcaaaagatcaaggaaatggaagaaacagaagacttttaattcttatcaataacatatttttctatgatctgtcttttaaacgatggattttccacaaatgcgcctctcaagtccctcatagaatgatacacgtataaaaaatatagcataggcaatgactccttatttttagacattagatatgccaaaatcatagccccgcttctatttactcccgcagcacaatgaaccaacacgggctcgtttcgttgatcacatttagataaaaaggcggttacgtcgtcaaaatatttactaatatcggtagttgtatcatctaccaacggtatatgaataatattaatattagagttaggtaatgtatatttatccatcgtcaaatttaaaacatatttgaacttaacttcagatgatggtgcatccatagcatttttataatttcccaaatacacattattggttacccttgtcattatagtgggagatttggctttgtgcatatctccagttgaacgtagtagtaagtatttatacaaacttttcttatccatttataacgtacaaatggataaaactactttatcggtaaacgcgtgtaatttagaatacgttagagaaaaggctatagtaggcgtacaagcagccaaaacatcaacacttatattctttgttattatattggcaattagtgcgctattactctggtttcagacgtctgataatccagtctttaatgaattaacgagatatatgcgaattaaaaatacggttaacgattggaaatcattaacggatagcaaaacaaaattagaaagtgatagaggtagacttctagccgctggtaaggatgatatatttgaattcaaatgtgtggatttcggcgcctattttatagctatgcgattggataagaaaacatatctgccgcaagctattaggcgaggtactggagacgcgtggatggttaaaaaggcggcaaaggtcgatccatctgctcaacaattttgtcagtatttgataaaacacaagtctaataatgttattacttgtggtaatgagatgttaaatgaattaggttatagcggttattttatgtcaccgcattggtgttccgattttagtaatatggaatagtgttagataaatgcggtaacgaatgttcctgtaaggaaccataacagcttagatttaacgttaaagatgagcataaacataataaacaaaattacaatcaaacttataacattaatatcaaacaatccaaaaaatgaaatcagtggagtagtaaacgcgtacataactcctggataacgtttagcagctgccgttcctattctagaccaaaaattcggtttcatgttttcgaaacggtattctgcaacaagtcgaggatcgtgttctacatatttggcggcattatccagtatctgcctattgatcttcatttcgttttcgattctggctatttcaaaataaaatcccgatgatagacctccagactttataatttcatctacgatgttcagcgccgtagtaactctaataatataggctgataagctaacatcataccctcctgtatatgtgaatatggcatgatttttgtccattacaagctcggttttaactttattgcctgtaataatttctctcatctgtaggatatctatttttttgtcatgcattgccttcaagacgggacgaagaaacgtaatatcctcaataacgttatcgttttctacaataactacatattctacctttttattttctaactcggtaaaaaaattagaatcccatagggctaaatgtctagcgatatttcttttcgtttcctctgtacacatagtgttacaaaaccctgaaaagaagtgagtatacttgtcatcatttctaatgtttcctccagtccactgtataaacgcataatccttgtaatgatctggatcatccttgactaccacaacatttcttttttctggcataacttcgttgtcctttacatcatcgaacttctgatcattaatatgctcatgaacattaggaaatgtttctgatggaggtctatcaataactggcacaacaataacaggagttttcaccgccgccatttagttattgaaattaatcatatacaactctttaatacgagttatattttcgtctatccattgtttcacattgacatatttcgacaaaaagatataaaatgcgtattccaatgcttctctgtttaatgaattactaaaatatacaaacacgtcactgtctggcaataaatgatatcttagaatattgtaacaatttattttgtattgcacatgttcgtgatctatgagttcttcttcgaatggcataggatctccgaatctgaaaacgtataaataggagttagaataataatatttgagagtattggtaatatataaactctttagcggtataattagtttttttctctcaatttctatttttagatgtgatggaaaaatgactaattttgtagcattagtatcatgaactctaatcaaaatcttaatatcttcgtcacacgttagctctttgaagtttttaagagatgcatcagttggttctacagatggagtaggtgcaacaattttttgttctacacatgtatgtactggagccattgttttaactataatggtgcttgtatcgaaaaactttaatgcagatagcggaagctcttcgccgcgactttctacgtcgtaattgggttctaacgccgatctctgaatggatactagttttctaagttctaatgtgattctctgaaaatgtaaatccaattcctccggcattatagatgtgtatacatcggtaaataaaactatagtatccaacgatcccttctcgcaaattctagtcttaaccaaaaaatcgtatataaccacggagatggcgtatttaagagtggattcttctaccgttttgttcttggatgtcatataggaaactataaagtccgcactactgttaagaatgattactaacgcaactatatagtttaaattaagcattttggaaacataaaataactctgtagacgatacttgactttcgaataagtttgcagacaaacgaagaaagaacagacctctcttaatttcagaagaaaactttttttcgtattcctgacgtctagagtttatatcaataagaaagttaagaattagtcggttaatgttgtatttcattacccaagtttgagatttcataatattatcaaaagacatgataatattaaagataaagcgctgactatgaacgaaatagctatatggttcgctcaagaatatagtcttgttaaacgtggaaacgataactgtatttttaatcacgtcagcggcatctaaattaaatataggtatatttattccacacactctacaatatgccacaccatcttcataataaataaattcgttagcaaaattattaattttagtgaaatagttagcgtcaactttcatagcttccttcaatctaatttgatgctcacacggtgcgaattccactctaacatcccttttccatgcctcaggttcatcgatctctataatatctagttttttgcgtttcacaaacacaggctcgtctctcgcgatgagatctgtatagtaactatgtaaatgataactagatagaaagatgtagctatatagatgacgatcctttaagagaggtataataactttaccccaatcagatagactgttgttatggtcttcggaaaaagaatttttataaatttttccagtattttccaaatatacgtacttaacatctaaaaaatccttaatgataataggaatggataatccgtctattttataaagaaatacatatcgcacattatacttttttttggaaatgggaataccgatgtgtctacataaatatgcaaagtctaaatattttttagagaatcttagttggtccaaattcttttccaagtacggtaatagatttttcatattgaacggtatcttcttaatctctggttctagttccgcattaaatgatgaaactaagtcactatttttataactaacgattacatcacctctaacatcatcatttaccagaatactgatcttcttttgtcgtaaatacatgtctaatgtgttaaaaaaaagatcatacaagttatacgtcatttcatctgtggtattcttgtcattgaaggataaactcgtactaatctcttctttaacagcctgttcaaatttatatcctatatacgaaaaaatagcaaccagtgtttgatcatccgcgtcaatattctgttctatcgtagtgtataacaatcgtatatcttcttctgtgatagtcgatacgttataaaggttgataacgaaaatatttttatttcgtgaaataaagtcatcgtaggattttggacttatattcgcgtctagtagatatgcttttatttttggaatgatctcaattagaatagtctctttagagtccatttaaagttacaaacaactaggaaattggtttatgatgtataatttttttagtttttatagattctttattctatacttaaaaaatgaaaataaatacaaaggttcttgagggttgtgttaaattgaaagcgagaaataatcataaattatttcattatcgcgatatccgttaagtttgtatcgtaatggcgtggtcaattacgaataaagcggatactagtagcttcacaaagatggctgaaatcagagctcatctaaaaaatagcgctgaaaataaagataaaaacgaggatattttcccggaagatgtaataattccatctactaagcccaaaaccaaacgagccactactcctcgtaaaccagcggctactaaaagatcaaccaaaaaggaggaagtggaagaagaagtagttatagaggaatatcatcaaacaactgaaaaaaattctccatctcctggagtcagcgacattgtagaaagcgtggccgctgtagagctcgatgatagcgacggggatgatgaacctatggtacaagttgaagctggtaaagtaaatcatagtgctagaagcgatctctctgacctaaaggtggctaccgacaatatcgttaaagatcttaagaaaattattactagaatctctgcagtatcgacggttctagaggatgttcaagcagctggtatctctagacaatttacttctatgactaaagctattacaacactatctgatctagtcaccgagggaaaatctaaagttgttcgtaaaaaagttaaaacttgtaagaagtaaatgcgtgcacttttttataaagatggtaaactctttaccgataataattttttaaatcctgtatcagacgataatccagcgtatgaggttttgcaacatgttaaaattcctactcatttaacagatgtagtagtatatgaacaaacgtgggaggaggcgttaactagattaatttttgtgggaagtgattcaaaaggacgtagacaatacttttacggaaaaatgcatgtacagaatcgcaacgctaaaagagatcgtatttttgttagagtatataacgttatgaaacgaattaattgttttataaacaaaaatataaagaaatcgtccacagattccaattatcagttggcggtttttatgttaatggaaactatgttttttattagatttggtaaaatgaaatatcttaaggagaatgaaacagtagggttattaacactaaaaaataaacacatagaaataagtcccgatgaaatagttatcaagtttgtaggaaaggacaaagtttcacatgaatttgttgttcataagtctaatagactatataaaccgctattgaaactgacggatgattctagtcccgaagaatttctgttcaacaaactaagtgaacgaaaggtatacgaatgtatcaaacagtttggtattagaatcaaggatctccgaacgtatggagtcaattatacgtttttatataatttttggacaaatgtaaagtccatatctcctcttccgtcaccaaaaaagttaatagcattaactatcaaacaaactgctgaagtggtaggtcatactccatcaatttcaaaaagagcttatatggcaacgactattttagaaatggtaaaggataaaaattttttagatgtagtatctaaaactacgttcgatgaattcctatctatagtcgtagatcacgttaaatcatctacggatggatgatatagatctttacacaaataattacaagaccgataaatggaaatggataagcgtatgaaatctctcgcaatgacagctttcttcggagagctaagcacattagatattatggcattgataatgtctatatttaaacgccatccaaacaataccattttttcagtggataaggatggtcagtttatgattgatttcgaatacgataattataaggcttctcaatatttggatctgaccctcactccgatatctggagatgaatgcaagactcacgcatcgagtatagccgaacaattggcgtgtgcggatattattaaagaggatattagcgaatatatcaaaactactccccgtcttaaacgatttataaaaaaataccgcaatagatcagatactcgtatcagtcgagatacagaaaagcttaaaatagctctagctaaaggcatagattacgaatatataaaagacgcttgttaataagtaaatgaaaaaaaactagtcgtttataataaaacacgatatggatgccaacgtagtatcattttctactattgcgacgtatatagacgctttagcgaagaatgcttcggaattagaacagaggtctaccgcatacgaaataaataatgaattggaactagtatttattaagccgccattgattactttgacaaatgtagtgaatatctctacgattcaggaatcgtttattcgatttaccgttactaataaggaaggtgttaaaattagaactaagattccattatctaaggtacatggtctagatgtaaaaaatgtacagttagtagatgctatagataacatagtttgggaaaagaaatcattagtgacggaaaatcgtcttcacaaagaatgcttgttgagactatcgacagaggaacgtcatatatttttggattacaagaaatatggatcctctatccgactagaattagtcaatcttattcaagcaaaaacaaaaaactttacgatagactttaagctaaaatattttctaggatccggtgcccagtctaaaagttctttgttgcacgctattaatcatccaaagtcaaggcctaatacatctctggaaatagaattcacacctagagacaatgaaacagttccatatgatgaactaataaaggaattgacgactctctcgcgtcatatatttatggcttctccagagaatgtaattctttctccgcctattaacgcgcctataaaaacctttatgttgcctaaacaagatatagtaggtttggatctggaaaatctatatgccgtaactaagactgacggcattcctataactatcagagttacatcaaacgggttgtattgttattttacacatcttggttatattattagatatcctgttaagagaataatagattccgaagtagtagtctttggtgaggcagttaaggataagaactggaccgtatatctcattaagctaatagagcctgtgaatgcaatcaatgatagactagaagaaagtaagtatgttgaatctaaactagtggatatttgtgatcggatagtattcaagtcaaagaaatacgaaggtccgtttactacaactagtgaagtcgtcgatatgttatctacatatttaccaaagcaaccagaaggtgttattctgttctattcaaagggacctaaatctaacattgattttaaaattaaaaaggaaaatactatagaccaaactgcaaatgtagtatttaggtacatgtccagtgaaccaattatctttggagaatcgtctatctttgtagagtataagaaatttagcaacgataaaggctttcctaaagaatatggttctggtaagattgtgttatataacggcgttaattatctaaataatatctattgtttggaatatattaatacacataatgaagtgggtattaagtccgtggttgtacctattaagtttatagcagaattcttagttaatggagaaatacttaaacctagaattgataaaaccatgaaatatattaactcagaagattattatggaaatcaacataatatcatagtcgaacatttaagagatcaaagcatcaaaataggagatatctttaacgaggataaactatcggatgtgggacatcaatacgccaataatgataaatttagattaaatccagaagttagttattttacgaataaacgaactagaggaccgttgggaattttatcaaactacgtcaagactcttcttatttctatgtattgttccaaaacatttttagacgattccaacaaacgaaaggtattggcgattgattttggaaacggtgctgacctggaaaaatacttttatggagagattgcgttattggtagcgacggatccggatgctgatgctatagctagaggaaatgaaagatacaacaaattaaactctggaattaaaaccaagtactacaaatttgactacattcaggaaactattcgatccgatacatttgtctctagtgtcagagaagtattctattttggaaagtttaatatcatcgactggcagtttgctatccattattcttttcatccgagacattatgctaccgtcatgaataacttatccgaactaactgcttctggaggcaaggtattaatcactaccatggacggagacaaattatcaaaattaacagataaaaagacttttataattcataagaatttacctagtagcgaaaactatatgtctgtagaaaaaatagctgatgatagaatagtggtatataatccatcaacaatgtctactccaatgactgaatacattatcaaaaagaacgatatagtcagagtgtttaacgaatacggatttgttcttgtagataacgttgatttcgctacaattatagaacgaagtaaaaagtttattaatggcgcatctacaatggaagatagaccgtctacaaaaaactttttcgaactaaatagaggagccattaaatgtgaaggtttagatgtcgaagacttacttagttactatgttgtttatgtcttttctaagcggtaaataataatatggtatgggttctgatctcccagttctaaatgcattaaataattccaatagagcgatttttgttcctataggaccttccaactgtggatactctgtattgttaatagatatattaatacttttgtcgggtaacagaggttctacgtcttctaaaaataaaagttttataacatctggcctgttcataaataaaaacttggcgattctatatatactcttattatcaaatctagccattgtcttatagatgtgagctactgtaggtgtaccatttgattttctttctaatactatatatttctctcgaagaagttcttgcacatcatctgggaataaaatactactgttgagtaaatcagttattttttttatatcgatattgatggacatttttatagttaaggataataagtatcccaaagtcgataacgacgataacgaagtatttatacttttaggaaatcacaatgactttatcagattaaaattaacaaaattaaaggagcatgtatttttttctgaatatattgtgactccagatacatatggatctttatgcgtcgaattaaatgggtctagttttcagcacggcggtagatatatagaggtggaggaatttatagatgctggaagacaagttagatggtgttctacatccaatcatatatctaaagatatacccgaagatatgcacactgataaatttgtcatttatgatatttatacgtttgattcgttcaagaataaacgattggtattcgtacaggtacctccgtcgttaggagatgatagtcatttgactaatccgttattgtcaccgtattatcgtaattcagtagccagacaaatggtcaatgatatgatttttaatcaagattcatttttaaaatatttattagaacatctgattagaagccactatagagtttctaaacatataacaatagttagatacaaggataccgaagaattaaatctaacgagaatatgttataatagagataagtttaaggcgtttgtattcgcttggtttaacggcgtttcggaaaatgaaaaggtactagatacgtataaaaaggtatctaatttgatataatgaattcagtgactgtatcacacgcgccatatactattacttatcacgatgattgggaaccagtaatgagtcaattggtagagttttataacgaagtagccagttggctgctacgagacgagacgtcgcctattcctgataagttctttatacagttgaaacaaccgcttagaaataaacgagtatgtgtgtgtggtatagatccgtatccgaaagatggaactggtgtaccgttcgaatcaccaaattttacaaaaaaatcaattaaggagatagcttcatctatatctagattaaccggagtaattgattataaaggttataaccttaatataatagacggggttataccctggaattattacttaagttgtaaattaggagaaacaaaaagtcacgcgatttactgggataagatttccaagttactgctgcagcatataactaaacacgttagtgttctttattgtttgggtaaaacagatttctcgaatatacgggccaagttagaatccccggtaactaccatagtcggatatcatccagcggctagagaccgccaattcgagaaagatagatcatttgaaattatcaacgttttactggaattagacaacaaggcacctataaattgggctcaagggtttatttattaatgctttagtgaaattttaacttgtgttctaaatggatgcggctattagaggtaatgatgttatctttgttcttaagactataggtgtcccgtcagcgtgcagacaaaatgaagatccaagatttgtagaagcatttaaatgcgacgagttagaaagatatattgagaataatccagaatgtacactattcgaaagtcttagggatgaggaagcatactctatagtcagaattttcatggatgtagatttagacgcgtgtctagacgaaatagattatttaacggccattcaagattttattatcgaggtgtcaaactgtgtagctagattcgcgtttacagaatgcggcgccattcatgaaaatgtaataaaatccatgagatctaatttttcattgactaagtctacaaatagagataaaacaagttttcatattatctttttagatacgtataccactatggatacattgatagctatgaaacgaacactattagaattaagtagatcatctgaaaatccactaaccagatcgatagacactgccgtatataggagaaaaacaactcttcgggttgtaggtactaggaaaaatccaaattgcgacactattcatgtaatgcaaccaccgcatgataatatagaagattacctattcacttacgtggatatgaacaacaatagttattacttttctctacaacaacgattggaggatttagttcctgataagttatgggaaccagggtttatttcattcgaagacgctataaaaagagtttcaaaaatattcattaattctataataaactttaatgatctcgatgaaaataattttacaacggtaccactggtcatagattacgtaacaccttgtgcattatgtaaaaaacgatcgcataaacatccgcatcaactatcgttggaaaatggtgctattagaatttacaaaactggtaatccacatagttgtaaagttaaaattgttccgttggatggtaataaactgtttaatattgcacaaagaattttagacactaactctgttttattaaccgaacgaggagaccatatagtttggattaataattcatggaaatttaacagcgaagaacccttgataacaaaactaattttgtcaataagacatcaactacctaaggaatattcaagcgaattactctgtccaagaaaacgaaagactgtagaagctaacatacgagacatgttagtagattcagtggagaccgatacctatccggataaacttccgtttaaaaatggtgtattggacctggtagacggaatgttttactctggagatgatgctaaaaaatatacgtgtactgtatcaaccggatttaaatttgacgatacaaagttcgtcgaagacagtccagaaatggaagagttaatgaatatcattaacgatatccaaccattaacggatgaaaataagaaaaatagagagctatatgaaaaaacattatctagttgtttatgcggtgctaccaaaggatgtttaacattcttttttggagaaactgcaactggaaagtcgacaaccaaacgtttgttaaagtctgctatcggtgacctgtttgttgagacgggtcaaacaattttaacagatgtattggataaaggacctaatccatttatcgctaacatgcatttgaaaagatctgtattctgtagcgaactacctgattttgcctgtagtggatcaaagaaaattagatctgacaatattaaaaagttgacagaaccttgtgtcattggaagaccgtgtttctccaataaaattaataatagaaaccatgcgacaatcattatcgatactaattacaaacctgtttttgataggatagataacgcattaatgagaagaattgccgtcgtgcgattcagaacacacttttctcaaccttctggtagagaggctgctgaaaataatgacgcgtacgataaagtcaaactattagacgaggggttagatggtaaaatacaaaataatatatatagatttgcatttctatacttgttggtgaaatggtacaaaaaatatcatgttcctattatgaaactatatcctacacccgaagagattcctgactttgcattctatctcaaaataggtactctgttggtatctagctctgtaaagcatattccattaatgacggacctctccaaaaagggatatatattgtacgataatgtggtcactcttccgttgactactttccaacagaaaatatccaagtattttaattctagactatttggacacgatatagagagcttcatcaatagacataagaaatttgccaatgttagtgatgaatatctgcaatatatattcatagaggatatttcatctccgtaaatatatgctcatatatttatagaagatatcacatatctaaatgaataccggaatcatagatttatttgataatcatgttgatagtataccaactatattacctcatcagttagctactctagattatctagttagaactatcatagatgagaacagaagcgtgttattgttccatattatgggatcaggtaaaacaataatcgctttgttgttcgccttggtagcttccagatttaaaaaggtttacattctagtgccgaacatcaacatcttaaaaattttcaattataatatgggtgtagctatgaacttgtttaatgacgaattcatagctgagaatatctttattcattccacaacaagtttttattctcttaattataacgataacgtcattaattataacggattatctcgctacaataactctatttttatcgttgatgaggcacataatatctttgggaataatactggagaacttatgaccgtgataaaaaataaaaacaagattccttttttactattgtctggatctcccattactaacacacctaatactctgggtcatattatagatttaatgtccgaagagacgatagattttggtgaaattattagtcgtggtaagaaagtaattcagacacttcttaacgaacgcggtgtgaatgtacttaaggatttgcttaaaggaagaatatcatattacgaaatgcctgataaagatctaccaacgataagatatcacggacgtaagtttctagatactagagtagtatattgtcacatgtctaaacttcaagagagagattatatgattactagacgacagctatgttatcatgaaatgtttgataaaaatatgtataacgtgtcaatggcagtattgggacaacttaatctgatgaataatttagatactttatttcaggaacaggataaggaattgtacccaaatctgaaaataaataatggcgtgttatacggagaagaattggtaacgttaaacattagttccaaatttaaatactttattaatcggatacagacactcaacggaaaacattttatatacttttctaattctacatatggcggattggtaattaaatatatcatgctcagtaatggatattctgaatataatggttctcagggaactaatccacatatgataaacggcaaaccaaaaacatttgctatcgttactagtaaaatgaaatcgtctttagaggatctattagatgtgtataattctcctgaaaacgatgatggtagtcaattgatgtttttgttttcatcaaacattatgtccgaatcctatactctaaaagaggtaaggcatatttggtttatgactatcccagatactttttctcaatacaaccaaattcttggacgatctattagaaaattctcttacgccgatatttctgaaccagttaatgtatatcttttagccgccgtatattccgatttcaatgacgaagtgacgtcattaaacgattacacacaggatgaattaattaatgttttaccatttgacatcaaaaagctgttgtatctaaaatttaagacgaaagaaacgaatagaatatactctattcttcaagagatgtctgaaacgtattctcttccaccacatccatcaattgtaaaagttttattgggagaattggtcagacaatttttttataataattctcgtattaagtataacgataccaagttacttaaaatggttacatcagttataaaaaataaagaagacgctaggaattacatagatgatattgtaaacggtcacttctttgtatcgaataaagtatttgataaatctcttttatacaaatacgaaaacgatattattacagtaccgtttagactttcctacgaaccatttgtttggggagttaactttcgtaaagaatataacgtggtatcttctccataaaactgatgagatatataaagaaataaatgtcgagctttgttaccaatggatacctttccgttacattggaaccacacgagctgacgttagacataaaaactaatattaggaatgccgtatataagacgtatctccatagagaaattagtggtaaaatggccaagaaaatagaaattcgtgaagacgtggaattacctctcggcgaaatagttaataattctgtagttataaacgttccgtgtgtaataacctacgcgtattatcacgttggggatatagtcagaggaacattaaacatcgaagatgaatcaaatgtaactattcaatgtggagatttaatctgtaaactaagtagagattcgggtactgtatcatttagcgattcaaagtactgcttttttcgaaatggtaatgcgtatgacaatggcagcgaagtcactgccgttctaatggaggctcaacaaggtatcgaatctagttttgtttttctcgcgaatatcgtcgactcataaaaaagagaatagcggtaagtataaacacgaatactatggcaataattgcgaatgttttattctcttcgatatatttttgataatatgaaaaacatgtctctctcaaatcggacaaccatctcataaaatagttctcgcgcgctggagaggtagttgccgctcgtataatctctccagaataatatacttgcgtgtcgtcgttcaatttatacggatttctatagttctctgttatataatgcggtttgccctcatgattagacgacgacaatagtgttctaaatttagatagttgatcagaatgaatgtttattggcgttggaaaaattatccatacagcgtctgcagagtggttgatagttgttcctagatatgtaaaataatccaacttactaggcagcaaattgtctagataaaatactgaatcaaacggtgcagacgtattggcggatctaatggaatccaattgattaactatcttttgaaaatatacatttttatgatccaatacttgtaagaatatagaaataatgataagtccatcatcgtgtttttttgcctcttcataagaactatattttttcttattccaatgaacaagattaatctctccagagtatttgtacacatctatcaagtgattggatccataatcgtcttcctttccccaatatatatgtagtgatgataacacatattcattggggagaaaccctccacttatatatcctcctttaaaattaatccttactagttttccagtgttctggatagtggttggtttcgactcattataatgtatgtctaacggcttcaatcgcgcgttagaaattgcttttttagtttctatattaataggagatagttgttgcggcatagtaaaaatgaaatgataactgtttaaaaatagctcttagtatgggaattacaatggatgaggaagtgatatttgaaactcctagagaattaatatctattaaacgaataaaagatattccaagatcaaaagacacgcatgtgtttgctgcgtgtataacaagtgacggatatccgttaataggagctagaagaacttcattcgcgttccaggcgatattatctcaacaaaattcagattctatctttagagtatccactaaactattacggtttatgtactacaatgaactaagagaaatctttagacggttgagaaaaggttctatcaacaatatcgatcctcactttgaagagttaatattattgggtggtaaactagataaaaaggaatctattaaagattgtttaagaagagaattaaaagaggaaagtgatgaacgtataacagtaaaagaatttggaaatgtaattctaaaacttacaacacgggataaattatttaataaagtatatataagttattgcatggcgtgttttattaatcaatcgttggaggatttatcgcatactagtatttacaatgtagaaattagaaagattaaatcattaaatgattgtattaacgacgataaatacgaatatctgtcttatatttataatatgctagttaatagtaaatgaacttttacagatctagtataattagtcagattattaagtataatagacgactagctaagtctattatttgcgaggatgactctcaaattattacactcacggcattcgttaaccaatgcctatggtgtcataaacgagtatccgtgtccgctattttattaactactgataacaaaatattagtatgtaacagacgagatagttttctctattctgaaataattagaactagaaacatgtttagaaagaaacgattatttctgaattattccaattatttgaacaaacaggaaagaagtatactatcgtcatttttttctctagatccagctactactgataatgatagaatagacgctatttatccgggtggcatacccaaaaggggtgagaatgttccagagtgtttatccagggaaattaaagaagaagttaatatagacaattcttttgtattcatagacactcggttttttattcatggcatcatagaagataccattattaataaattttttgaggtaatcttctttgtcggaagaatatctctaacgagtgatcaaatcattgatacatttaaaagtaatcatgaaatcaaggatctaatatttttagatccgaattcaggtaatggactccaatacgaaattgcaaaatatgctctagatactgcaaaacttaaatgttacggccatagaggatgttattatgaatcattaaaaaaattaactgaggatgattgattaaaaaatataaattaatttaccatcgtgtatttttataacgggattgtccggcatatcatgtagatagttaccgtctacatcgtatactcgaccatctacgcctttaaatcctctatttattgacattaatctattagaattggaataccaaatattagtaccctcaattagtttattggtaatattttttttagacgatagatcgatggctcttgaaaccaaggttttccaaccggactcattgtcgatcggtgagaagtctttttcattagcatgaatccattctaatgatgtatgtttaaacactctaaacaattggacaaattcttttgatttgctttgaatgatttcaaataggtcttcgtctacagtaggcataccattagataatctagccattataaagtgcacgtttacatatctacgttctggaggagtaagaacgtgactattgagacgaatggctcttcctactatctgacgaagagacgcctcgttccatgtcatatctaaaatgaagatatcattaattgagaaaaaactaataccctcgcctccactagaagagaatacgcatgttttaatgcattctccgttagtgtttgattcttggttaaactcagccaccgccttgattctagtatcttttgttctagatgagaactctatattagagataccaaagactttgaaatatagtaataagatttctattcctgactgattaacaaatggttcaaagactagacatttaccatgggatgctaatattcccaaacatacatctataaatttgacgcttttctcttttaattcagtaaatagagagatatcagccgcactagcatcccctttcaatagttctccctttttaaaggtatctaatgcggatttagaaaactctctatctcttaatgaatttttaaaatcattatatagtgttgctatctcttgcgcgtattcgcccggatcacgattttgtctttcaggaaagctatcgaacgtaaacgtagtagccatacgtctcagaattctaaatgatgatatacctgtttttatttcagcgagtttagccttttgataaatttcttcttgctttttcgacatattaacgtatcgcattaatactgttttcttagcgaatgatgcagacccttctacgtcatcaaaaatagaaaactcgttattaactatatacgaacatagtcctcctagtttggagactaattctttttcatcgactagacgtttattctcaaatagcgattggtgttgtaaggatcctggtcgtagtaagttaaccaacatggtgaattcttgcacactattgacgataggtgtagccgataaacaaatcatcttatggttttttaacgcaatggtcttagataaaaaattatatactgaacgagtaggacggatcttaccatcttctttgattaatgatttagaaatgaagttatgacattcatcaataatgacgcatattctactcttggaattaatagttttgatattagtaaaaaatttatttctaaaattttgatcatcgtaattaataaaaatacaatccttcgttatctctggagcgtatctgagtatagtgttcatccaaggatcttctatcaaagcctttttcaccaataagataatagcccaattcgtataaatatccttaagatgtttgagaatatatacagtagtcattgttttaccgacacccgtttcatggaacaataaaagagaatgcatactgtctaatcctaagaaaactcttgctacaaaatgttgataatccttgaggcgtactacgtccgaccccatcatttcaacgggcatattagtagttctgcgtaaggcataatcgatataggccgcgtgtgatttactcatttatgagtgataagtaataactatgttttaaaaatcacagcagtagtttaactagtcttctctgatgtttgttttcgatactttttgaatcagaagtcatactagaataaagcaacgagtgaacgtaatagagagcttcgtatactctattcgaaaactctaagaacttattaatgaattccgtatccactggattgtttaaaatactaaattgaacactgttcacatccttccaagaagaagacttagtgacggacttaacatgagacataaataaatccaaattttttttacaaacatcactagccaccataatggcgctatctttcaaccagctatcgcttacgcattttagcagtctaacatttttaaagagactacaatatattctcatagtatcgattacacctctaccgaataaagttggaagtttaataatacaatatttttcgtttacaaaatcaaataatggtcgaaacacgtcgaaggttaacatcttataatcgctaatgtatagattgttttcagtgagatgattattagatttaatagcatctcgttcacgtttgaacagtttattgcgtgcgctgaggtcggcaactacggcgtccgctttagtactcctcccataatactttacgctattaatctttaaaatttcatagactttatctagatcgctttctggtaacatgatatcatgtgtaaaaagttttaacatgtcggtcggcattctatttagatcattaactctagaaatctgaagaaagtaattagctccgtattccagactaggtaatgggcttttacctagagacagattaagttctggcaatgtttcataaaatggaagaaggacatgcgttccctcccggatattttttacaatttcatccatttacaactctatagtttgttttcattattattagttattatctcccataatcttggtaatacttaccccttgatcgtaagataccttatacaggtcattacatacaactaccaattgtttttgtacataatagattggatggttgacatccatggtggaataaactactcgaacagatagtttatctttccccctagatacattagccgtaatagttgtcggcctaaagaatatctttggtgtaaagttaaaagttagggttcttgttccattattgctttttgtcagtagttcattataaattctcgagatgggtccgttctctgaatatagaacatcatttccaaatctaacttctagtctagaaataatatcggtcttattcttaaaatctattcccttgatgaagggatcgttaatgaacaaatccttggcctttgattcggctgatctattatctccgttatagacgttacgttgactagtccaaagacttacaggaatagatgtatcgatgatgttgatactatgtgatatgtgagcaaagattgttctcttagtggcatcactatatgttccagtaatggcggaaaactttttagaaatgttatatataaaagaattttttcgtgttccaaacattagcagattagtatgaagataaacactcatattatcaggaacattatcaatttttacatacacatcagcatcttgaatagaaacgataccatcttctggaacctctacgatctcggcagactccggataaccagtcggtgggccatcgctaacaataactagatcatccaacaatctactcacatatgcatctatataatctttttcatcttgtgagtaccctggatacgaaataaatttattatccgtatttccataataaggtttagtataaacagagagagatgttgccgcatgaacttcagttacagtcgccgttggttggtttatttgacctattactctcctaggtttctctataaacgatggtttaatttgtacattcttaaccatatatccaataaagctcaattcaggaacataaacaaattctttgttgaacgtttcaaagtcgaacgaagagtcacgaataacgatatcggatactggattgaaggttaccgttacggtaatttttgaatcggatagtttaagactgctgaatgtatcttccacatcaaacggagttttaatataaacgtatactgtagatggttctttaatagtgtcattaggagttaggccaatagaaatatcattaagttcactagaatatccagagtgtttcaaagcaattgtattattgatacaattattatataattcttcgccctcaatttcccaaataacaccgttacacgaagagatagatacgtgattaatacatttatatccaacatatggtacgtaactgaatcttcccatacctttaacttctggaagttccaaactcagaaccaaatgattaagcgcagtaatatactgatccctaatttcgaagctagcgatagcctgattgtctggaccatcgtttgtcataactccggatagagaaatatattgcggcatatacaaagttggaatttgactatcgactgcgaagacattagaccgtttaatagagtcatccccaccgatcaaagaattaatgatagtattattcattttctatttaaaatggaaaaagcttacaataaactccgtagagaaatatctataatttgtgagttttccttaaagtaacagcttccgtaaacgccgtctttatctcttagtaggtttattgtatttatgaccttttccttatcttcatagaatactaaaggcaacaaagaaatttttggttcttctctaagagctacgtgagacttaaccatagaagccaacgaatccctacatattttagaacagaaataccctacttcaccacccttgtatgtctcaatactaataggtctaaaaaccaaatcttgattacaaaaccaacacttatcaattacactatttgtcttaatagacacatctgccatagatttataatactttggtagtatacaagcgagtgcttcttctttagcgggcttaaagactgctttaggtgctgaaataaccacatctggaaggcttactcgcttagccatttaattacggaactatttttttatacttctaatgagcaagtagaaaacctctcatctacaaaaacgtactcgtgtccataatcctctaccatagttacacgttttttagatctcatatgtgctaaaaagttttcccatactaattggttactattatttttcgtataatttttaacagtttgaggttttagatttttagttacagaagtgatatcgaatattttatccaaaaagaatgaataattaattgtcttagaaggagtgttttcttggcaaaagaataccaagtgcttaaatatttctactacttcattaatcttttctgtactcagattcagtttctcatcttttacttgattgattatttcaaagactaacttataatcctttttatttattctctcgttagccttaagaaaactagatacaaaatttgcatctacatcatccgtggatatttgatttttttccatgatatccaagagttccgagataatttctccagaacattgatgagacaataatctccgcaatacatttctcaaatgaataagtttattagacacgtggaagtttgactttttttgtacctttgtacatttttgaaataccgactcgcaaaaaatacaatattcatatccttgttcagatactataccgttatgtctacaaccgctacataatcgtagattcatgttaacactctacgtatctcgtcgtccaatattttatataaaaacattttatttctagacgttgccagaaaatcctgtaatatttttagttttttgggctgtgaataaagtatcgccctaatattgttaccgtcttccgccaatatagtagttaaattatccgcacatgcagaagaacaccgcttaggcggattcagtacaatgttatatttttcgtaccaactcatttaaatatcataatctaaaatagttctgtaatatgtctagcgctaatatattgatcataatcctgtgcataaattaagatacaacaatgtctcgaaatcatcgacatggcttcttccatagttagaagatcgtcgtcaaagttagcaacgtgattcatcaacatttgctgttttgaggcagcaaatactgaaccgtcgccattcaaccattcataaaaaccatcgtctgaatccattgataatttcttgtactggtttttgagagctcgcatcaatctagcatttctagctcccggattgaaaacagaaagaggatcgtacatccagggtccattttctgtaaatagaatcgtataatgtcccttcaagaagatatcagacgatccacaatcaaagaattggtctccgagtttgtaacaaactgcggactttaacctatacatgataccgtttagcataatttctggtgatacgtcaatcggagtatcatctattagagatctaaagccggtgtaacattctccaccaaacatattcttattctgacgtcgttctacataaaacatcattgctccattaacgataacaggggaatgaacagcactacccatcacattagttcccaatggatcaatgtgtgtaactccagaacatcttccatagcctatgttaggaggagcgaacaccactcttccactattgccatcgaatgccatagaataaatatccttggaattgatagaaatcggactgtcggatgttgtgatcatcttcataggattaacaactatgtatggtgccgcctgaagtttcatatcgtaactgatgccgtttataggtctagccacagaaaccaacgtaggtctaaatccaactatagacaaaatagaagccaatatctgttcctcatctgtcataacttgagagcatccagtatgaataatcttcattagatggggatctaccgcatcatcatcgttacaataaaaaattcccattctaatgttcataattgcttttctaatcatggtatgcatgtttgctctctgaatctctgtggaaattagatctgatacacctgtaatcactatcggattatcctccgtaagacgattaaccaacaacatataattataagactttacttttctaaattcataaagttgctggattaggctataggtgtctccatgtacatacgcgttctcgagcgcaggaagtttaataccgaatagtgccatcagaataggatgaatatagtaattagtttctggttttctataaataaaagacaaatcttgtgaactagacatatcggtaaaatgcatggattggaatcgtgtagtcgacagaagaatatgatgattagatggagagtatattttatctaactctttgagttggtcaccgattctaggactagctcgagaatgaataagtactaaaggatgagtacatttcacagaaacactagcattgttcaatgtgctctttacatgggtaaggagttgaaatagctcgtttctatttgttctgacaatatttagtttattcataatgttaagcatatcctgaatagtaaagttagatgtgtcatacttgttagtagttagatatttagcaattgcattcccatcatttctcaatctcgtactccaatcatgcgtggatgctacttcgtcgatggaaaccatacaatcctttttgataggctgttgagattgatcatttcctgcacgtttaggtttggtacgttgatttctagcccctgcggatataaagtcatcgtctacaatttgggacaatgaattgcatacactacaagacaaagatttatcagaagtgtgaatatgatcttcatctaccaaagaaagagtttgattagtataactagattttagtcctgcgttagatgttaaaaaaacatcgctattgaccacggcttccattatttatattcgtagtttttactcgaaagcgtgattttaatatccaatcttattacttttggaatcgttcaaaacctttgactagttgtagaatttgatctattgccctacgcgtatactcccttgcatcatatacgttcgtcaccagatcgtttgtttcggcctgaagttggtgcatatctctttcaacattcgacatgagatccttaagggccatatcgtctagattttgttgagatgctgctcctggatttggattttgttgtgctgttgtacatactgtaccaccagtaggtgtaggagtacatacagtggccacaataggaggttgagaaagtgtaaccgttggagtagtacaagaaatacttccatccgattgttgtgtacatgtagttgttggtaacgtctgagaaggttgggtagatggcggcgtcgtcgttttttgatctttattaaatttagagataatatcctgaacagcattgctcggcgtcaacgctggaaggagtgaactcgccggcgcatcagtatcttcagacagccaatcaaaaagattagacatatcagatgatgtattagtttgttgtcgtggttttggtgtaggagcagtactactaggtagaagaataggagccgatgtagctgttggaaccggctgtggagttatatgaatagttggttgtagcggttggataggctgtctgctggcggccatcatattatctctagctagttgttctcgcaactgtctttgataatacgactcttgagactttagtcctatttcaatcgcttcatcctttttcgtatccggatccttttcttcagaataatagattgacgactttggtgtagaggattctgccagcctctgtgagaacttgttaaagaagtccatttaaggctttaaaattgaattgcgattataagattaaatggcagacacagacgatattatcgactatgaatccgatgatctcaccgaatacgaggatgatgaagaagaggaagaagatggagagtcactagaaactagtgatatagatcccaaatcttcttataagattgtagaatcagcatccactcatatagaagatgcgcattccaatcttaaacatatagggaatcatatatctgctcttaaacgacgctatactagacgtataagtctatttgaaatagcgggtataatagcagaaagctataacttgcttcaacgaggaagattacctctagtttcagaattttctgacgaaacgatgaagcaaaatatgctacatgtaattatacaagagatagaggagggttcttgtcctatagtcatcgaaaagaacggagaattgttgtcggtaaacgattttgacaaagatggtctaaaattccatctagactatattatcaaaatttggaaacttcaaaaacgatattagaatttatacgaatatcgttctctaaatgtcacaatcaagtctcgcatgttcagcaatttattgtcgtactttatatcgtgttcattaacgatatcttgcaaaatagtaatgattctatcttccttcgatagatattcttcagagattattgtcttatattctttcttgttatcagatatgaatttgataagactttgaacattattgatacccgtctgtttaattttttctacagatattttagttttggcagattctatcgtatctgtcaatagacatccaacatcgacattcgacgtcaattgtctataaatcaacgtataaattttagaaataacattagcgaattgttgtgcgttgatgtcgttattctgaaacagtatgattttaggtagcattttcttaacaaagagaacgtatttattgttactcagttgaacagatgatatatccagattactaacgcatctgattccgtataccaaactttcagaagaaatggtatacaattgtttgtattcattcaatgtctctttttcagaaattagtttagagtcgaatactgcaataattttcaagagatagttttcatcagataagattttatttagtgtagatatgataaaactattgttttgttggagaacttgatacgccgcgttctctgtagtcgacgctctcaaatgggaaacaatctccattatttttttggaatcggatactatatcttcggtatcttgacgcagtctagtatacatagagttaagagagattagagtttgtacattaagcaacatgtctctaaatgtggctacaaacttttcctttttcacatcatctagtttattatataccgatttcacaacggcaccagatttaaggaaccagaatgaaaaactctgataactacaatatttcatcatagttacgattttatcatcttctatagttggtgtaatagcgcatacctttttctccaagactggaaccaacgtcataaaaatgtttaaatcaaaatccatatcaacatctgatgcgctaagaccagtctcgcgttcaagattatctttactaatggtgacgaactcatcgtataaaactctaagtttgtccattatttatttacagatttagttgtttaatttatttgtgctcttccagagttgggatagtatttttctaacgtcggtattatattattaggatctacgttcatatgtatcataatattaatcatccacgttttgataaatctatctttagcttctgaaataacgtatttaaacaaaggagaaaaatatttagctacggcatcagacgcaataacattttttgtaaatgtaacgtatttagacgacagatcttcgttaaaaagttttccatctatgtagaatccatcggttgttaacaccattcccgcgtcagattgaataggagtttgaatagtttgttttggaaatagatccttcaataacttatagttgggtgggaaaaaatcgattttatcactagactctttcttttttactatcattacctcatgaactatttcttgaatgagtatatgtattttctttcctatatcggacgcgttcattggaaaatataccatgtcgttaactataagaatatttttatcctcgtttacaaactgaataatatcagatgtagttcgtaaacgaactatatcatcaccagcacaacatctaactatatgatatccactagtttcctttagccgtttattatcttgttccatattagcagtcattccatcatttaagaaggcgtcaaaaataatagggagaaatgacattttggattctgttacaactttaccaaaattaaggatatacggacttactatctttttctcaacgtcaatttgatgaacacacgatgaaaatgtgcttctatgagattgatcatgtagaaaacaacaagggatacaatatttccgcatatcatgaaatatattaagaaatcccaccttattatatttccccaaaggatccatgcacgtaaacattatgccgttatcattaataaagacttctttctcatcggatctgtaaaagttgttactgatttttttcattccaggatctagataattaataatgatgggttttctattcttattctttgtattttggcatatcctagaccagtaaacagtttccactttggtaaaatcagcagacttttgaacgctattaaacatggcattaatggcaataactaaaaatgtaaaatatttttctatgttaggaatatggtttttcactttaatagatatatggtttttggccaaaatgatagatatttttttatccgaggatagtaaaatattattagtcgccgtctctataaaaatgaagctagtctcgatatccaattttattctagaattgataggagtcgccaaatgtaccttatacgttatatctcccttgatgcgttccatttgtgtatctatatcggacacaagatctgtaaatagttttacgttattaatcatcacggtatcgccgtcgctagataacgctaatgtaccatccaagtcccaaatggagagatttaactgttcatcgtttagaataaaatgattaccggtcatattaataaagtgttcatcgtatctagataacaacgacttataattaatgtccaagtcttgaactcgctgaatgatcttttttaacccagttagttttagattggtacgaaatatattgttaaactttgattctacagtaatgtccaaatctagttgtggaaatacttccatcaacattgtttcaaacttgataatattattatctacatcttcgtacgatccaaattccggaatagatgtatcgcacgctctggccacccagataaccaaaaagtcacacgctccaggatatacattgtataaaaagctatcgttttttagtagggtttttttctgcgtgtatacgaagggattaaaaatagtattatcaacgtaactatattccaaattattcttatgagaatagataataatatcgtccttaatatctaacaaatttcctaaatatccctttaattgagtcattcgaagcgtcaatagaatatgtctcttaactatttccggctgttgtatatttaaatgacttcgtaaaaaataatatatgggcgacttctcatctatgtaatcatatggagtgagatatagggctcgttctacctcctgccccttacccacctgtaataccaattgcggacttactatatatcgcatatttatatcgtggggtaaagtgaaaatctactaccgatgatgtaagtcttacaatgttcgaaccagtaccagatcttaatttggaggcctccgtagaactaggggaggtaaatatagatcaaacaacacctatgataaaggagaatagcggttttatatcccgcagtagacgtctattcgcccatagatctaaggatgatgagagaaaactagcactacgattctttttacaaagactttattttttagatcatagagagattcattatttgttcagatgcgttgacgctgtaaaagacgtcactattaccaaaaaaaataacattatcgtggcgccttatatagcacttttaactatcgcatcaaaaggatgcaaacttacagaaacaatgattgaagcattctttccagaactatataatgaacatagtaagaaatttaaattcaactctcaagtatccatcatccaagaaaaactcggataccagtttggaaactatcacgtttatgattttgaaccgtattactctacagtagctctggctattcgagatgaacattcatctggcatttttaatatccgtcaagagagttatctggtaagttcattatctgaaataacatatagattttatctaattaatctaaaatctgatcttgttcaatggagtgctagtacgggcgctgtaattaatcaaatggtaaatactgtattgattacagtgtatgaaaagttacaactggtcatagaaaatgattcacaatttacatgttcattggctgtggaatcaaaacttccaataaaattacttaaagatagaaatgaattatttacaaaattcattaacgagttaaaaaagaccagttcattcaagataagcaaacgcgataaggatacgctactaaaatattttacttaggactggagttagaatttatagacgactcatttcgtttatcattgttactattattactattactatcattattagtgttggcattattagtattcttcttgtcatcttgttcagaaatatacagcaatgctatacctaatactaaatacattatcatgctcgcaatggctctaacaacaacgaaccaaaatgaatttggtcgtagcttttgttcacaaaaatacataaagaaatgtctacataaatctatggcgccattggctacttgaaatagcgccagtcctcctacagattttaatatagctgtataacatgacatttattcatcatcaaaagagacagagtcaccatctgtcatatttagattttttttcatgtgttcaaagtatcctctactcatttcattataatagtttatcatacttagaattttaggacggatcaatgagtaagacttgactagatcgtcagtagtaatttgtgcatcgtctattctgcatccgcttcgtcgaataatgtatagcatcgctttgagattctccatagctatcaagtctttatacaatgacatggaaatatctgtgaatactttatacttctccaacatcgatgccttaacatcatcgcctactttagcattgaaaatacgttctattgtgtagatggatgtagcaagatttttaaacaacaatgccatcttacacgatgattgcctcaagtctccaatcgtttgtttagaacgattagctacagagtccaatgcttggctgactagcatattattatctttagaaattgtattcttcaatgaggcgtttatcatatctgtgatttcgttagtcatattacagtctgactgggttgtaatgttatccaacatatcacctatggatacggtacacgtaccagcatttgtaataatcctatctaagatgttgtatggcattgcgcagaaaatatcttctcctgtaatatctccactctcgataaatctactcagattattcttaaatgccttattctctggagaaaagatatcagtgtccatcatttcattaatagtatacgcagaaaagataccacgagtatcaattctatccaagatacttatcggttccgagtcacagataatggtttcctctccttcgggagatcctgcatagaaatatctaggacaatagtttctatactgtctgtaactctgataatctctaaagtcactaactgataccatgaaattgagaagatcaaacgctgaagtaattaatttttctgcctcgtttttactacaactagttttcatcaatgtagtgacgatgtattgtttagttacttttggtctaatactgatgatagagatattattgcttcccataatggatcttctagtagtcaccttaaagcccattgatgcgaatagcagatagataaagtcttggtatgactcctttctaatatagtacggactacctttgtcacccaactttatacccacataagccataacaacctctttaatagccgtttcatgaggtttatcagccatgagcctgagtagttggaagaatctcatgaatcccgtctcagaaagtcctatatgcatgatagatttatctttcctgggaaactctcgtatagtcatagatgaaatactctttaaagtttctgaaataagattagtaacagtcttacctccgactactctaggtaacaaacaaactctaataggtgttttctctgcggagataatatcagaaaggatagagcaataagtagtattattgtgattataaagaccgaatacataacaggtagaatttataaacatcatgtcctgaaggtttttagacttgtattcctcgtaatccataccgtcccaaaacatggatttggtaactttgatagccgtagatctttgttccttcgccaacaggttaaagaaattaataaagaatttgttgtttctatttatgtccacaaattgcacgtttggaagcgccacggttacattcactgcagcattttgaggatcgcgagtatgaagtacgatgttattgtttactggtatatctggaaagaaatctaccagtctaggaataagagattgatatcgcatagaaatagtaaagtttataatctcatcatcgaagagcattttgttaccattgtaataaatatccactctgtcatatgtataaatgaagtactgttcaaacatgatgagatgtttatatgttggcatagtagtgagatcgacgtttggtaatggcaatgtattaagattaactccataatgtctagcagcatctgcgatgttataagcgtcgtcaaagcggggtcgatcttgtattgttatatattgtctaacacctataagattatcaaaatcttgtctgcttaatacaccgttaacaatttttgccttgaattcttttattggtgcattaataacatccttatagaggatgttaaacaaataagtgttatcaaagttaagatctggatatttcttttctgctagaacatccattgagtcggagccatctggtttaatataaccaccgataaatctagctctgtattctgtatccgtcaatctaatattaagaaggtgttgagtgaaaggtggaagatcgtaaaagctgtgagtattaatgataggattagtttccgaactaatgttaattggggtattaataatatctatatttccagcgttaagtgtaacattaaacagttttaattcacgtgacgtggtatcaattaaataattaatgcccaatttggatatagcagcctgaagctcatcttgtttagttacggatcctaatgagttattaagcaatatatcgaacggatgaacgaaggttgttttaagttggtcacatactttgtaatctagacatagatgcggaagaacggtagaaactatacgaaataaatattcagagtcctctaattgatcaagagtaactattgacttaataggcatcatttatttagtattaaatgacgaccgtaccagtgacggatatacaaaacgatttaattacagagttttcagaagataattatccatctaacaaaaattatgaaataactcttcgtcaaatgtctattctaactcacgttaacaacgtggtagatagagaacataatgccgccgtagtgtcatctccagaggaaatatcctcacaacttaatgaagatctatttccagatgatgattcaccggccactattatcgaacgagtacaacctcatactactattattgacgatactccacctcctacgtttcgtagagagttattaatatcggaacaacgtcaacaacgagaaaaaagatttaatattacagtatcgaaaaatgctgaagcaataatggaatctagatctatgataacttctatgccaacacaaacaccatccttgggagtagtttatgataaagataaaagaattcagatgttagaggatgaagtggttaatcttagaaatcaacgatctaatacaaaatcatctgataatttagataattttaccaaaatactatttggtaagactccgtacaaatcaacagaagttaataagcgtatagccatcgttaattatgcaaatttgaacgggtcccccttatcagtcgaggacttggatgtttgttcggaggatgaaatagatagaatctataaaacgattaaacaatatcacgaaagtagaaaacgaaaaattatcgtcactaacgtgattattattgtcataaacattatcgagcaggcattgctaaaactcggatttgaagaaatcaaaggactgagtaccgatatcacttcagaaattatcgatgtggagatcggagatgactgcgatgctgtagcatctaaactaggaatcggtaacagtccggttcttaatattgtattgtttatactcaagatattcgttaaacgaattaaaattatttaatttaatacattcccatatccagacaacaatcgtctggattaatctgttcctgtcgtctcataccggacgacatattaatctttttattagtgggcatctttttagatggtttctttttcccagcattaactgagtcgatacctagaagatcgtgattgatctctccgaccattccacgaacttctaattggccgtctctgacggtaccataaactattttaccagcattagtaacagcttggacaatctgaccatccatcgcattgtacgatgtagtagtaactgttgttctacgtctaggagcaccagaagtatttttggagcccttggatgttgatgtagaagaagacgaggattttgattttggtttacatgtaatacattttgaactctttgattttgtatcacatgcgccggcagtcacatctgtttgagaattaagattattgttgcctcctttgacggctgcatctccaccgatttgcgctagtagatttttaagctgtggtgtaatcttattaactgtttcgatataatcatcgtaactgcttctaacggctaaattttttttatccgccatttagaagctaaaaatatttttatttatgcagaagatttaactagattatacaatgaactaatatgatccttttccagattatttacaaacttggtattttttggttctggaggaggcgaatttaaattcggacttggattcggattttgtaagttcttgatcttattatacatcgagtataggatggcgacagtaactgctacacaaataccgatcaaaagaagaataccaatcatttattgacaataacttcactattgatcaagtatgcaatatatcatcttttcactaaataagtagtaataatgattcaacaatgtcgagatatatggacgataataatttagttcatggaaatatcgctatgattggtgtgaatgactccgctaactctgtggggtgcgcagtgctttccccacatagaataaattagcattccgactgtgataataataccaagtataaacgccataatactcaatactttccatgtacgagtgggactggtagacttactaaagtcaataaaggcgaagatacacgaaagaatcaaaagaatgattccagcgattagcacgccggaaaaataatttccaatcataagcatcatgtccatttaactaataaaaattttaaatcgccgaatgaacaaagtggaatataaaccatataaaaacaatagtttgtactgcaaaaataatatctatttttgttttcgaagatatggtaaaattaaatagtagtacacagcatgttataactaacagcagcaacggctcgtaattacttatcatttactagacgaaaaggtggtgggatattttcttgctcaaataatacgaatatatcacccatccattttatgcgatgtttatatactctaatctttaatagatctatagacgacgggtttaccaacaatatagattttatcgattcatctaatttaaacccttccttaaacgtgaatgatctattatctggcataacgatgaccctacctgatgaatcggacaatgtactgggccatgtagaataaattatcaacgaattatcgtctacgaacatttatatcatttgttttaattttaggacgcgaataaatggatataaaatagaaaataacagatattacaaccagtgttatggccgcgcccaaccaggtaggcagttttattttatcttttactacaggttctcctggatgtacgtcaccaacggcggacgtagttctagtacaattagacgtaagttccgcttgggaattttttaacgctaaagagttaacgttaatcgtgcacccaacgtatttacatctagttcgttgaacatcttgattataatataaccattttctatctctagattcgtcagtgcactcatgtaaccaacataccctaggtcctaaatatttatctccggaattagattttggataattcgcgcaccaacaatttctatttcctttatgatcgttacaaaagacgtataatgccgtatccccaaaagtaaaataatcaggacgaataattctaataaactcagaacaatatctcgcatccatatgtttggagcaaatatcggaataagtagacatagccggtttccgttttgcacgtaaccattctaaacaattggggtttccaggatcgtttctacaaaatccagtcatgaaatcgtcacaatgttctgtcttgtaattattattaaatatttttggacagtgtttggtatttgtcttagaacaacattttgccacgctatcactatcgcccaggagataatccttttttataaaatgacatcgttgcccggatgctatataatcagtagcgtgttttaaatccttaatatattcaggagttacctcgttctgataatagattaatgatccaggacgaaatttgaaagaactacatggttctccatgaattaatacatattgtttagcaaattcaggaactataaaactactacaatgatctatcgacataccatctatcaaacaaaacttgggtttaatttctcccggagatgtttcataatagtacgtataactttcttctgcaaacttaacagctctattatattcaggataattaaaacctaattccatatatttgtctcgtatatctgctattcctggtgctattttgattctattaagagtaacagctgcccccattcttaataatcgtcagtatttaaactgttaaatgttggtatatcaacatctaccttatttcccgcagtataaggtttgttgcaggtatactgttcaggaatggttacatttatacttcttctatagtcctgtctttcgatgttcatcacatatgcaaagaacagaataaacaaaataatgtaagaaataatattaaatatctgtgaattcgtaaatacattgattgccataataattacagcagctacaatacacacaatagacattcccacagtgttgccattacctccacgatacatttgagttactaagcaataggtaataactaagctagtaagaggcaatagaaaagatgagataaatatcatcaatatagagattagaggagggctatatagagccaagacgaacaaaatcaaaccgagtaacgttctaacatcattatttttgaagattcccaaataatcattcattcctccataatcgttttgcatcatacctccatctttaggcataaacgattgctgctgttcctctgtaaataaatctttatcaagcactccagcacccgcagagaagtcgtcaagcatattgtaatatcttaaataactcatttatatattaaaaaatgtcactattaaagatggagtataatctttatgccgaactaaaaaaaatgacttgtggtcaacccctaagtctttttaacgaagacggggatttcgtagaagttgaaccgggatcatcctttaagtttctgatacctaagggattttacgcctctccttccgtaaagacgagtctagtattcgagacattaacaacgaccgataataaaatcactagtatcaatccaacaaatgcgccaaagttatatcctcttcaacgcaaagtcgtatctgaagtagtttctaatatgaggaaaatgatcgaatcaaaacgtcctctatacatcactcttcacttggcgtgtggatttggtaagactattaccacgtgttatcttatggctacacacggtagaaaaaccgtcatttgcgtacccaataaaatgttaatacatcaatggaagacacaggtagaggcagtcggattggaacataagatatccatagatggagtaagtagtctattaaaggaactaaagactcaaagtccggatgtattaatagtagtcagtagacatctgacaaacgatgccttttgtaaatatatcaataagcattatgatttgttcatcttggatgaatcacatacgtataatctgatgaacaatacagcagttacaagatttttagcgtattatcctccgatgatgtgttattttttaactgctacacctagaccatctaaccgaatttattgtaacagtattattaatattgccaagttatccaatctaaaaaaaactatctatgcagtagatagtttttttgagccatattccacagataatattagacatatggtaaaacgactagatggaccatctaataaatatcatatatataccgagaagttattatctgtagacgagcctagaaatcaacttattcttgataccctggtagaagaattcaagtcaggaactattaatcgcattttagttattactaaactacgtgaacatatggtattattctacaaacgattattagattttttcggaccagaggttgtatttataggagacgcccaaaatagacgtactccagatatggtcaaatcaatcaaggaactaaatagatttatattcgtatccaccttattttattccggtactggtttagatattcctagtttggattcgttgttcatttgctcggcagtaatcaacaatatgcaaatagagcaattactagggagggtatgtcgagaaacagaactattagataggacggtatatgtatttcctaacacatccatcaaagaaataaagtacatgataggaaatttcatgcaacgaattattagtctgtctgtagataaactaggatttaaacaaaaaagttatcggaaacatcaagaatccgatcccacttctgcatgtacaacatcatccagagaagaacgtgtattaaatagaatatttaactcgcaaaatcgttaagaagtttaagcgacgatccgcatgctgcgcaggccagtgtattacccctcatagtattaatataatccaatgatacttttgtgatgtcggaaatcttaaccaatttagactgacaggcagaacacgtcatgcaatcatcatcgtcatcgataactgtagtcttgggcttctttttgcgactcttcattccggaacgcacattggtgctatccatttaggtagtaaaaaataagtcagaatatgccctataacacgatcgtgcaaaacctggtatatcgtctctatctttatcacaatatagtgtatcgacatttttattattattgacctcgtttatcttggaacatggaatgggaacatttttgttatcaacggccatctttgccttaattccagatgttgtaaaattataactaaacagtctatcatcgacacaaatgaaattcttgtttagacgtttgtagtttacgtatgcggctcgttcgcgtctcattttttcagatattgcaggtactataatattaaaaataagaatgaaataacataggattaaaaataaagttatcatgacttctagcgctgatttaactaacttaaaagaattacttagtctgtacaaaagtttgagattttcagattctgcggctatagaaaagtataattctttggtagaatggggaacatctacttactggaaaataggcgtgcaaaaggtagctaatgtcgagacgtcaatatctgattattatgatgaggtaaaaaataaaccgtttaatattgatccgggctattacattttcttaccggtatattttgggagcgtctttatttattcgaagggtaaaaatatggtagaacttggatctggaaactcttttcaaataccagatgatatgcgaagtgcgtgtaacaaagtattagacagcgataacggaatagactttctgagatttgttttgttaaacaatagatggataatggaagatgctatatcaaaatatcagtctccagttaatatatttaaactagctagtgagtacggattaaacatacccaaatatttagaaattgaaatagaggaagacacattatttgacgacgagttatactctattatagaacgctctttcgatgataaatttccaaaaatatccatatcgtatattaagttgggagaacttagacggcaagttgtagactttttcaaattctcattcatgtatattgagtccatcaaggtagatcgtataggagataatatttttattcctagcgttataacaaaatcaggaaaaaagatattagtaaaagatgtagaccatttaatacgatccaaggttagagaacatacatttgtaaaagtaaaaaagaaaaacacattttccattttatacgactatgatggaaacggaacagaaactagaggagaagtaataaaacgaattatagacactataggacgagactattatgttaacggaaagtatttctctaaggttggtagtgcaggcttaaagcaattgactaataaattagatattaatgagtgcgcaactgtcgatgagttagttgatgagattaataaatccggaactgtaaaacgaaaaataaaaaaccaatcagcatttgatttaagcagagaatgtttgggatatccagaagcggattttataacgttagttaataacatgcggttcaaaatagaaaattgtaaggttgtaaatttcaatattgaaaatactaattgtttaaataacccgagtattgaaactatatatggaaactttaaccagttcgtctcaatctttaatgtcgtcaccgatgtcaaaaaaagattattcgagtgaaataatatgcgcctttgatataggtgcaaaaaatcctgccagaactgttttagaagtcaaggataactccgttagggtattggatatatcaaaattagactggagttctgattgggaaaggcgcatagctaaagatttgtcacaatatgaatacactacagttcttctagaacgtcagcctagaaggtcgccgtatgttaaatttatctattttattaaaggctttttatatcatacatcggctgccaaagttatttgcgtctcgcctgtcatgtctggtaattcatatagagatcgaaaaaagagatcggtcgaagcatttcttgattggatggacacattcggattgcgagactccgttccggatagacgcaaattagacgatgtagcggatagtttcaatttggctatgagatacgtattagataaatggaatactaattatacaccttataataggtgtaaatctagaaattacataaaaaaaatgtaataacgttagtaacgccattatggataatctatttacctttctacatgaaatagaagatagatatgccagaactatttttaactttcatctaataagttgcgatgaaataggagatatatatggtcttatgaaagaacgcatttcctcagaggatatgtttgataatatagtgtataataaagatatacatcctgccattaagaaactagtgtattgcgacatccaacttactaaacacattattaatcagaatacgtatccggtatttaacgattcttcacaagtgaaatgttgtcattatttcgacataaactcagataatagcaatattagctctcgtacagtagagatatttgagagggaaaagtcatctcttgtatcatatattaaaactaccaataagaagagaaaggtcaattacggcgaaataaagaaaactgttcatggaggcactaatgcaaattacttttccggtaaaaagtctgacgagtatctgagtactacagttagatccaacattaatcaaccttggatcaaaaccatctctaagaggatgagagttgatatcattaatcactctatagtaacgcgtggaaaaagctctatattacaaactatagaaattatttttactaatagaacatgtgtgaaaatattcaaggattctactatgcacattattctatccaaggacaaggatgaaaaggggtgtatacacatgattgacaaattattctatgtctattataatttatttctgttgttcgaagatatcatccaaaacgagtactttaaagaagtagctaatgttgtaaaccacgtactcacggctacggcattagatgagaaattattcctaattaagaaaatggctgaacacgatgtttatggagttagcaatttcaaaatagggatgtttaacctgacatttattaagtcgttggatcataccgttttcccctctctgttagatgaggatagcaaaataaagttttttaaggggaaaaagctcaatattgtagcattacgatctctggaggattgtataaattacgtgactaaatccgagaatatgatagaaatgatgaaggaaagatcgactattttaaatagcatagatatagaaacggaatcggtagatcgtctaaaagaattgcttctaaaatgaaaaaaaacactaattcagaaatggatcaacgactagggtataagtttttggtgcctgatcctaaagccggagttttttatagaccgttacatttccaatatgtatcgtattctaattttatattgcatcgattgcatgaaatcttgaccgtcaagcggccactcttatcgtttaagaataatacagaacgaattatgatagaaattagcaatgttaaagtgactcctccagattactcacctataatcgcgagtattaaaggtaagagttatgacgcattagccacgttcactgtaaatatctttaaagaggtaatgaccaaagagggtatatccatcactaaaataagtagttatgagggaaaagattctcatttgataaaaattccgctactaataggatacgggaataaaaatccacttgatacagccaagtatcttgttcctaatgtcataggtggagtctttatcaataaacaatctgtcgaaaaagtaggaattaatctagtagaaaagattacaacatggccaaaatttagggttgttaagccaaactcattcactttctcgttttcctccgtatcccctcctaatgtattaccgacaagatatcgccattacaagatatctctggatatatcacaattggaagcgttgaatatatcatcgacaaagacatttataacggtcaatattgttttgctgtctcaatatttatctagagtgagtctagaattcattagacgtagtttatcatacgatatgcctccagaagttgtctatctagtaaacgcgataatagatagtgctaaacgaattactgaatctattactgactttaatattgatacatacattaatgacctggtggaagctgaacacattaaacaaaaatctcagttaacgatcaacgagttcaaatatgaaatgctgcataactttttacctcatatgaactatacacccgatcaactaaagggattttatatgatatctttactaagaaagtttctctactgtatcttccacacttctagatatccagatagagattcgatggtttgtcatcgcatcctaacgtacggcaaatattttgagacgttggcacatgatgaattagagaattacataggcaacatccgaaacgatatcatgaacaatcacaagaacagaggcacttacgcggtaaacattcatgtactaacaactcccggacttaatcacgcgttttctagcttattgagtggaaagttcaaaaagtcagacggtagttatcgaacacatcctcactattcatggatgcagaatatttctattcctaggagtgttggattttatccggatcaagtaaagatttcaaagatgttttctgtcagaaaataccatccaagtcaatatctttacttttgttcatcagacgttccggaaagaggtcctcaggtaggtttagtatctcaattgtctgtcttgagttccattacaaatatactaacgtctgagtatttggatttggaaaagaaaatttgtgagtatatcagatcatattataaagatgatataagttactttgaaacaggatttccaatcactatagaaaatgctctagtcgcatctcttaatccaaatatgatatgtgattttgtaactgactttagacgtagaaaacggatgggattcttcggtaacttggaggtaggtattactttagttagggatcacatgaatgaaattcgcattaatattggagcgggaagattagtcagaccattcttggttgtggataacggagagctcatgatggatgtgtgtccggagttagaaagcagattagacgacatgacattctctgacattcagaaagagtttccgcatgtcatcgaaatggtagatatagaacaatttacttttagtaacgtatgtgaatcggttcaaaaatttagaatgatgtcaaaggatgaaagaaagcaatacgatttatgtgactttcctgccgaatttagagatggatatgtagcatcttcattagtgggaatcaatcacaattctggacccagagctattcttggatgtgctcaagctaaacaagctatctcttgtctgagctcggatatacgaaataaaatagacaatggaattcatttgatgtatccagagaggccaatcgtgattagtaaggctttagaaacttcaaagattgcggctaattgcttcggccaacatgttactatagcattaatgtcgtacaaaggtatcaatcaagaggatggaattatcatcaaaaaacaatttattcagagaggcggtctcgatattgttacagccaagaaacatcaagtagaaattccattggaaaactttaataacaaagaaagagataggtctaacgcctattcaaaattagaaagtaatggattagttagactgaatgctttcttggaatccggagacgctatggcacgaaatatctcatcaagaactcttgaagatgattttgctagagataatcagattagcttcgatgtttccgagaaatataccgatatgtacaaatctcgcgttgaacgagtacaagtagaacttactgacaaagttaaggtacgagtattaaccatgaaagaaagaagacccattctaggagacaaatttaccactagaacgagtcaaaagggaacagtcgcgtatgtcgcggatgaaacggaacttccatacgacgaaaatggtatcacaccagatgtcattattaattctacatccatcttctctagaaaaactatatctatgttgatagaagttattttaacagccgcatattctgctaagccgtacaacaataagggagaaaaccgacctgtctgttttcctagtagtaacgaaacatccatcgatacatatatgcaattcgctaaacaatgttatgagcattcaaatccgaaattgtccgatgaagaattatcggataaaatcttttgtgaaaagattctctatgatcctgaaacggataagccttatgcatccaaagtattttttggaccaatttattacttgcgtctgaggcatttaactcaggacaaggcaaccgttagatgtagaggtaaaaagacgaagctcattagacaggcgaatgagggacgaaaacgtggaggaggtatcaagttcggagaaatggagagagactgtttaatagcgcatggtgcagccaatactattacagaagttttgaaagattcggaagaagattatcaagatgtgtatgtttgtgaaaattgtggagacatagcagcacaaatcaagggtattaatacatgtcttagatgttcaaaacttaatctctctcctctcttaacaaaaattgataccacgcacgtatctaaagtatttcttactcaaatgaacgccagaggcgtaaaagtcaaattagatttcgaacgaaggcctccttcgttttataaaccattagataaagttgatctcaagccgtcttttctggtgtaatattctagtttggtagtagatacatatcaatatcatcaaattcgagatccgaattataaaatgggcgtggattgttaactatagaatcggacgtctgatattcgaaaatctgtggagtttcaggttttggtggaggtgtaactgctacttgggatactgaagtctgatattcagaaagctgtggatgttctggttcggcatccaccgatggtgtcacatcactaatcggttcggtaacgtctgtggatggaggtgctacttctacagaacctgtagcctcagttgtcaacggagatacatttttaatgcgagaaaatgtataatttggtaatggtttcttatgtggatctgaagaagaggtaagatatctactagaaagataccgatcacgttctagttctcttttgtagaacttaactttttctttctccgcatctagttgatattccaacctcttcacgttactacgttcagattccaattcacgttcgcatgggttacctccgcagtttttacgagcgatttcacgttcagccttcatgcgtctctccctctctctatcgagtttatcagagcagtctttctgaaggcgatcgaactccataaatttctccaacgctttgattgtttccatagatttccgaagttcagcttttaggactgtgattctttttctttcgaattcacagctggatgtacaaccgtttccattaccgccatctctaagtttcttttctagatcggcaacatttcatccccatgccttttacattcctcgagtctactgtcgtcgaaatatcgttccagctccttttcgacatcaataactttagcacgttgtctctcaagctctcttttgtagttatctgattccctggcacgtttaagatcttcatgcaattgagtcagctcttaacttcctctcttgcttcttcgtcatagtacgcgcaatcactgtgagatccattgttaccacgtctacactcggcgagctcgcgtttaagagattcaatttcccgtttgtattggtccatgtttccattgctaccaccattagatttacaggctgctagttgtcgttcgagatcagaaatacgggttttcttggaattgatttcgtcgatgtacttggcatcgaaacacttattaagttctttttccaattctacgattttatttctttcgcgagtcaattccctcctgtagtaactatctgttttgtcagattcacgctctctacgtagactttcttgcaagttactaatttgttccctagcacgtccgagtttagttttatatgctgaatagagttctgattcatcctttgagcagatctctagcgatcgtttaagattcctaattctagtctttagcctatttacctcctcagaagatgttccgttaccgttgcgtttacactcgttaagctgtctatcaagatccatgattctatctctaagacgttgcatctctctttccatatcagcattgctttcattattacgtctgcagtcactcaactgtctttcaatatctgagattctatctctaagacgtcgcatctctctctgtttcggcattggtttcattattacgtttacagtcgttcaactgtctttcaagatctgatattctagattggagtctgctaatctctgtagcattttcacggcattcactcagttgtctttcaagatctgaaattttagattggagtctgctaatctctgtaagatttcctcctccgctctcgatgcagtcggtcaacttattctctagttctctaatacgcgaacgcagtgcatcaacttcttgcgtgtcttcctggttgcgtgtacattcatcgagatctctaacgcgtcgtcgttcttcctcaagttctctgcgtactacagaaagcgtgtccctatcttgttgatatttagcaatttctgattctagagtactgattttgcttacgtagttactaatagttgtcttggccttatcaagatcctccttgtatttgtcgcattccttgatatccctacgaagtctggacagttcccattcgacattacgacgtttatcgatttcagctcggagatcgtcatcgcgttgttttagccacatacgactgagttcaagttctcgttgacaagatccatctacttttccattcctaatagtatccagttccttttctagttctgaacgcatttctcgttccctatcaagcgattctctcaattctcggatagtcttcttatcaatttctaataaatctgaaccatcatctgtcccattttgaatatccctgtgttctttgatctcttttgtaagtcggtcgattctttcggttttataaacagaatccctttccaaagtcctaatcttactgagtttatcactaagttctgcattcaattcggtgagttttctcttggcttcttccaactctgttttaaactctccactatttccgcattcttcctcgcatttatctaaccattcaattagtttattaataactagttggtaatcagcgattcctatagccgttcttgtaattgtgggaacataattaggatcttctaatggattgtatggcttgatagcatcatctttatcattattagggggatggacaaccttaattggttggtcctcatctcctccagtagcgtgtggttcttcaataccagtgttagtaataggcttaggcaaatgcttgtcgtacgcgggcacttcctcatccatcaagtatttataatcgggttctacttcagaatattcttttctaagagacgcgacttcgggagttagtagaagaactctgtttctgtatctatcaacgctggaatcaatactcaagttaaggatagcgaatacctcatcgtcatcatccgtatcttctgaaacaccatcatatgacatttcatgaagtctaacgtattgataaatagaatcagatttagtattaaacagatccttaacctttttagtaaacgcatatgtatattttagatctccagatttcataatatgatcacatgccttaaatgtcagtgcttccatgatataatctggaacactaatgggtgacgaaaaagatacagcaccatatgctacgttgataaataaatctgaaccactaagtagataatgattaatgttaagaaagaggaaatattcagtgtataggtatgtcttggcgtcatatcttgtactaaacacgctaaacagtttgttaatgtgatcaatttccaatagattaattagagcagcgggaataccaacaaacatattaccacatccgtattttctatgaatatcacatatcatgttaaaaaatcttgatagaagagcgaatatctcgtctgacttaatgagtcgtagttcagcagcaacataagtcataactgtaaatagaacatactttcctgtagtgttgattctagactccacatcaacaccattattaaaaatagttttatatacatctttaatctgctctccgttaatcgtcgaacgttctagtatacggaaacactttgatttcttatctgtagttaatgacttagtgatatcacgaagaatattacgaattacatttcttgtttttcttgagagacctgattcagaactcaactcatcgttccatagtttttctacctcagtggcgaaatctttggagtgcttggtacatttttcaataaggttcgtgacctccatttattataaaaaatttattcaaaacttaactacaatcgggtaattataagatcgtagatctcccatgtggcggaatactaccatctatcgcatgtggatggacagtaggtaatggccatgggaacagtaatgtttgcatatttatctttcttgctagtattactgcatattgtcccaatgtttcgatgtgatgttctaacctatcaactgccgctgtatcacaacaatagtgtccgatgaaattaagattatgatccaatgtgtttaatatatgattatcaagtcttatacgatccgcgtcttttttgacaggatcaggttcttctacaggaagaagtttcggcctcttatgatattcatgtctgggaaacggtggtctagggtgaggctccggtatcggagtgggttttggattataatcatcatcgtctatgacatcatcttcgacttcgatatttattttgctatcttgatgatgtcctgtatcagttgcattttcagcactcgactgaatattagcgcattcattgtctattattaccatatttctaaacccaaaatgtatgtgttgaacatcagtactatcgttgatgagtcttatagcatgaattcgcttatcgttatcgggtttatcttctgtcaccttagcaattccttttttattaaactctacataatcatatccatttctattgtttgttctaatataaacgagtatagcatcattgctaaatttttcaatagtatcaaaaacagaatatcctaaaccatataatatatattcaggaacactcaaactaaatgtccaggattctcctaaatacgtaaactttaatagtgcgaaatcattcaaaaatctaccacttatagatagatagtacataaatgcgtatagtagtctacctatctctttattatgaaaaccggcattacgatcatatatgtcgtgatatacctgtgatccgtttacgttaaaccataaatacatgggtgatcctataaacatgaatttatttctaattctcagagctatagttaattgaccgtgtaatatttgcttacatgcatacttgatacgcttattaataagatttttatcattgctcgttatttcagaatcgtatatataaggagtaccatcgtgattcttaccagatattatacaaaatactatatataaaatatattgacccacgttagtaatcatataaatgtttaacgttttaaattttgtattcaatgatccattatcatacgctatcatggtcttgtaatattcattctttaaaatataatattgtgttagccattgcattggagctcctaatggagattttctattctcatccattttaggataggctttcataaagtccctaataacttcgtgaataatgtttctatgttttctactgatgcatgtatttgcttcgatttttttatcccatgtttcatctatcatagatttaaacgcagtaatgctcgcaacattaacatcttgaaccgttggtacaattccgttccataaatttataatgttcgccatttatataactcattttttgaatatacttttaattaacaaaagagttaagttactcatatggacgccgtccagtctgaacatcaatctttttagccagagatatcatagccgctcttagagtttcagcgtgattttccaacctaaatagaacttcatcgttgcgtttacaacacttttctatttgttcaaactttgttgttacattagtaatctttttttccaaattagttagccgttgtttgagagtttcctcattgtcgtcttcatcggctttaacaattgcttcgcgtttagcctctggctttttagcagcctttgtagaaaaaaattcagttgctggaattgcaagatcgtcatctccggggaaaagagttccgtccatttaaagtacagattttagaaactgacactctgcgttatttatatttggtacaacacatggattataaatattgatgttaataacatcagaaaatgtaaagtctatacattgttgcatcgtgttaaattttctaatggatctagtattattgggtccaacttctgcctgaaatccaaatatggaagcggatacaaaaccgtttcctggataaaccacacatctccacttttgctttacatcagaaattgtgtcgttgacatcttgaactctcctatctaatgccggtgttccacctatagattttgaatattcgaatgctgcatgagtagcattaaattccttaatattgccataattttcatatattgagtaaccctggataaaaagtaaacacaccgcagccgtcgctaccacaataaaaaaaattgatagagagttcatttataatctattagaagctgacaaaatttttttacacgcatcagacaatgctttaataaatagttcaacatctacttttgtcatatcgaaccgatggtatgattctaacctagaattacatccgaaaaagttgactatgttcatagtcattaagtcattaacaaacaacattccagactctggattataagacgatactgtttcgtcacaattacctaccttaatcatgtgattatgaatattggctattagagcaccttctaagaaatctataatatctttgaaacacgatttaaaatcaaaccacgaatatacttctacgaagaaagttagtttacccataggagaaataactataaatggagatctaaatacaaaatccggatctatgatagttttaacattattatattctctattaaatacctccacatctaaaaatgttaattttgaaactatgtcttcgtttattaccgtacctgaactaaacgctataagctctattgtttgagaactctttaaacgatattcttgaaatacatgtaacaaagtttcctttaactcggtcggtttatctaccatagttacagaatttgtatccttatctataatataataatcaaaatcgtataaagttatataattatcgcgttcagattgtgatcttttcaaatagactaaaaaccccatttctctagtaagtatcttatgtatatgtttgtaaaatatcttcatggtgggaatatgctctaccgcagttagccattcctcattgacagcggtagatgtattagacaaaactattccaatgtttaacaagggccattttacgagattattaaatccttgtttgataaatgtagccaatgagggttcgagttcaacgacgattgaattctcttcccgcggatgctgcatgatgaacgacgggatgttgttcgattgatttggaattctttttcgactttttgtttatattaaatattttaaaatttatagcggatagcaattcatgtaccacggataatgtagacgcgtattgcgcatcgatatctttattattagataaatttatcaataaatgtgagaagtttgcctcgttaaggtcttccatttaaatattatataaacatttgtgtttgtatcttattcgtcttttatggaatagttttttactagtaaagctgcaattacacactttgtccgtaaaacataaatataaacaccagcttttatcaatcgttccaaaaagtcgacggcggacatttttaacatggcatctattttaaatacacttaggtttttggaaaaaacatcattttataattgtaacgattcaataactaaagaaaagattaagattaaacataagggaatgtcatttgtattttataagccaaagcattctaccgttgttaaatacttgtctggaggaggtatatatcatgatgatttggttgtattggggaaggtaacaattaataatctaaagatgatgctattttacatggatttatcatatcatggagtgacaagtagtggagcaatttacaaattgggatcgtctatcgatagactttctctaaataggactattgttacaaaagttaataattatgatgatacattttttgacgacgatgattgatcgctattgcacaattttgtttttgtactttctaatatagtgtttaggttctttttcatatgagaatattgatttactaaaatatctatgtttaacttttgttctatgacgtccttatcggcggtatcggtacatatacgtaattcaccttcacaaaatacggagtcttcgataataatagccaatcgattattggatctagctgtctgtatcatattcaacatgtttaatatatcctttcgtttcccctttacaggcatcgatcgtagcatattttccgcgtctgatatggaaatgttaaaactacaaaaatgcgtaatgttagcccgtcctaatattggtacgtgtctataagtttggcatagtagaataatagacgtgtttaaatgccttccaaagtttaagaattctattagagtattgcattttgatagtttatcgcctacatcatcaaaaataagtaaaaagtgtgctgattttttatgattttgtgcgacagcaatacatttttctatgttacttttagttcgtatcagattatattctagagattcctgactactaacgaaattaatatgatttggccaaatgtatccatcataatctgggttataaacgggtgtaaacaagaatatatgtttatattttttaactagtgtagaaaacagagatagtaaatagatagtttttccagatccagatcctcctgttaaaaccattctaaacggcatttttaataaattttctcttgaaaattgtttttcttggaaacaattcataattatatttacagttactaaattaatttgataataaatcaaaatatggaaaactaaggttgttagtagggaggagaacaaagaaggcacatcgtgatataaataacatttattatcatgatgacaccagaaaacgacgaagagcagacatctgtgttctccgctactgtttacggagacaaaattcagggaaagaataaacgcaaacgcgtgattggtctatgtattagaatatctatggttatttcactactatctatgattaccatgtccgcgtttctcatagtgcgcctaaatcaatgcatgtctgctaacgaggctgctattactgacgccgctgttgccgttgctgctgcatcatctactcatagaaaggttgcgtctagcactacacaatatgatcacaaagaaagctgtaatggtttatattaccagggttcttgttatatattacattcagactaccagttattctcggatgctaaagcaaattgcactgcggaatcatcaacactacccaataaatccgatgtcttgactacctggctcattgattatgttgaggatacatggggatctgatggtaatccaattacaaaaactacatccgattatcaagattctgatgtatcacaagaagttagaaagtatttttgtgttaaaacaatgaactaatatttatttttgtacattaataaatgaaatcgcttaatagacaaactgtaagtaggtttaagaagttgtcggtgccggccgctataatgatgatactctcaaccattattagtggcataggaacatttctgcattacaaagaagaactgatgcctagtgcttgcgccaatggatggatacaatacgataaacattgttatttagatactaacattaaaatgtctacagataatgcggtttatcagtgtcgtaaattacgagctagattgcctagacctgatactagacatctgagagtattgtttagtattttttataaagattattgggtaagtttaaaaaagaccaatgataaatggttagatattaataatgataaagatatagatattagtaaattaacaaattttaaacaactaaacagtacgacggatgctgaagcgtgttatatatacaagtctggaaaactggttaaaacagtatgtaaaagtactcaatctgtactatgtgttaaaaaattctacaagtgacaacaaaaaatgaattaataataagtcgttaacgtacgccgccatggacgccgcgtttgttattactccaatgggtgtgttgactataacagatacattgtatgatgatctcgatatctcaatcatggactttataggaccatacattataggtaacataaaaactgtccaaatagatgtacgggatataaaatattccgacatgcaaaaatgctactttagctataagggtaaaatagttcctcaggattctaatgatttggctagattcaacatttatagcatttgtgccgcatacagatcaaaaaataccatcatcatagcatgcgactatgatatcatgttagatatagaagataaacatcagccattttatctattcccatctattgatgtttttaacgctacaatcatagaagcgtataacctgtatacagctggagattatcatctaatcatcaatccttcagataatctgaaaatgaaattgtcgtttaattcttcattctgcatatcagacggcaatggatggatcataattgatgggaaatgcaatagtaattttttatcataaaagttgtaaagtaaataataaaacaataaatattgaactagtagtacgtatattgagcaatcagaaatgatgctggtacctcttatcacggtgaccgtagttgcgggaacaatattagtatgttatatattatatatttgtaggaaaaagatacgtactgtctataatgacaataaaattatcatgacaaaattaaaaaagataaagagttctaattccagcaaatctagtaaatcaactgatagcgaatcagactgggaggatcactgtagtgctatggaacaaaacaatgacgtagataatatttctaggaatgagatattggacgatgatagcttcgctggtagtttaatatgggataacgaatccaatgttatggcgcctagcacagaacacatttacgatagtgttgctggaagcacgctgctaataaataatgatcgtaatgaacagactatttatcagaacactacagtagtaattaatgaaacggagactgttgaagtacttaatgaagataccaaacagaatcctaactattcatccaatcctttcgtaaattataataaaaccagtatttgtagcaagtcaaatccgtttattacagaacttaacaataaatttagtgagaataatccgtttagacgagcacatagcgatgattatcttaataagcaagaacaagatcatgaacacgatgatatagaatcatcggtcgtatcattggtgtgattagtttcctttttataaaattgaagtaatatttagtattattgctgccgtcacgttgtacaaatggagatattccctgtattcggcatttctaaaattagcaattttattgctaataatgactgtagatattatatagatacagaacatcaaaaaattatatctgatgagatcaatagacagatggatgaaacggtacttcttaccaacatcttaagcgtagaagttgtaaatgacaatgagatgtaccatcttattcctcatagattatcgacgattatactctgtattagttctgtcggaggatgtgttatctctatagataatgacatcaatggcaaaaatattctaacctttcccattgatcatgctgtaatcatatccccactgagtaaatgtgtcgtagttagcaagggtcctacaaccatattggttgttaaagcggatatacctagcaaacgattggtaacatcgtttacaaacgacatactatatgtaaacaatctgtcactgattaattatttgccgttgtctgtattcattattagacgagtcaccgactatttggatagacacatatgcgatcagatatttgctaataataagtggtattcccttataaccatcgacgataagcaatatcctattccatcaaactgtataggtatgtcctctgccaagtacataaattctagcatcgagcaagatactttaatccatgtttgtaacctcgagcatccgttcgactcagtatacaaaaaaatgcagtcgtacaattctctacctatcaaggaacaaatattgtacggtagaattgataatataaatatgagcattagtatttctgtggattaatagatttctagtatggggatcattaatcatctctaatctctaaatacctcataaaacgaaaaaaaagctattatcaaatactgtacggaatggattcattctcttctctttttatgaaactctgttgtatatctactgataaaactggaagcaaaaaatctgatagaaagaataagaataagatcaaggattatatggaacacgattattataaaataacaatagttcctggttcctcttccacgtctactagctcgtggtattatacacatgcctagtaatagtctctttgcgttgacggaaagcagactagaaataacaggctaaaatgttcagacaccataatagttcccaacccagataataacagagttccatcaacacattcctttaaactcaatcccaaacccaaaaccgttaaaatgtatccggccaattgatagtagataatgaggtgtacagcgcatgataatttacacagtaaccaaaatgaaaatactttagtaattataagaaatatagacggtaatgtcatcatcaacaatccgataatatgcctgagagtaaacattgacggataaaacaaaaatgctccgcataactctatcatggcaataacacaaccaaatacttgtaagattcctaaattagtagaaaatacaacgaatatcgatgtataagtgatctcgagaaataataagaataaagtaatgcccgtaaagataaacatcaacattgtttggtaatcattaaaccaattagtatgaagttgaactaatttcacagtagattttattccagtgttatcctcgcatgtataagtacctggtaagatatctttatattccataatcaatgagacatcactatctgataacgaatgaagtctagcactagtatgccatttacttaatattgtcgtcttggaagttttattataagttaaaatatcatggttatccaatttccatctaatatactttgtcggattatctatagtacacggaataatgatggtatcattacatgctgtatactctatggtctttgtagttgttataacaaccaacgtatagaggtatatcaacgatattctaactcttgacattttttatttatttaaaatgatacctttgttatttattttattctattttgctaacggtattgaatggcataagtttgaaacgagtgaagaaataatttctacttacttattagacgacgtattatacacgggtgttaatggggcggtatacacattttcaaataataaactaaacaaaactggtttaactaataataattatataacaacatctataaaagtagaggatgcggataaggatacattagtatgcggaaccaataacggaaatcccaaatgttggaaaatagacggttcagacgacccaaaacatagaggtagaggatacgctccttatcaaaatagcaaagtaacgataatcagtcacaacggatgtgtactatctgacataaacatatcaaaagaaggaattaaacgatggagaagatttgacggaccatgtggttatgatttattcacggcggataacgtaattccaaaagatggtttacgaggagcattcgtcgataaagacggtacttatgacaaagtttacattcttttcactgatactatcggctcaaagagaattgtcaaaattccgtatatagcacaaatgtgcctaaacgacgaaggtggtccatcatcattgtctagtcatagatggtcgacgtttctcaaagtcgaattagaatgtgatatcgacggaagaagttatagacaaattattcattctagaactataaaaacagataatgatacgatactatatgtattcttcgatagtccttattccaagtccgcattatgtacctattctatgaataccattaaacaatctttttctacgtcaaaattggaaggatatacaaagcaattgccgtctccagctcctggtatatgtttaccagctggaaaagttgttccacataccacgtttgaagtcatagaacaatataatgtactagatgatattataaagcctttatctaaccaacctatcttcgaaggaccgtctggtgttaaatggttcgatataaaggagaaggaaaatgaacatcgggaatatagaatatacttcataaaagaaaattctatatattcgttcgatacaaaatctaaacaaactcgtagctcgcaagtcgatgcgcgactattttcagtaatggtaactgcgaaaccgttatttatagcagatatagggataggagtaggaatgccacaaatgaaaaaaatacttaaaatgtaatcttaatcgagtacaccacacgacaatgaacaaacataagacagattatgctggttatgcttgctgcgtaatatgcggtctaattgtcggaattatttttacagcgacactattaaaagttgtagaacgtaaattagttcatacaccattaatagataaaacgataaaagatgcatatattagagaagattgtcctactgactggataagctataataataaatgtatccatttatctactgatcgaaaaacctgggaggaaggacgtaatgcatgcaaagctctaaattcaaattcggatctaattaagatagagactccaaacgagttaagttttttaagaagccttagacgaggctattgggtaggagaatccgaaatattaaaccagacaaccccatataattttatagctaagaatgccacgaagaatggaactaaaaaacggaaatatatttgtagcacaacgaatactcccaaactgcattcgtgttacactatataacaattacactacatttttatcataccactacttcggttagatgttttagaaaaaaataaatatcgccgtaccgttcttgtttttataaaaataacaattaacaattatcaaattttttctttaatattttacgtggttgaccattcttggtggtaaaataatctcttagtgttggaatggaatgctgtttaatgtttccacactcatcgtatattttgacgtatgtagtcacatcgtttacgcaatagtcagactgtagttctatcatgcttcctacatcagaaggaggaacagttttaaagtctcttggttttaatctattaccgttagttttcatgaaatcctttgttttatccacttcacattttaaataaatgtccactatacattcttttgttaattttactagatcgtcatgggtcatagaatttataggttccgtagtccatggatccaaactagcaaacttcgcgtatacggtatcgcgattagtgtatacaccaactgtatgaaaattaagaaaacagtttaataaatcaacagaaatatttaatcctccgtttgatacagatgcgccatatttatggatttcggattcacacgttgtttgtctgaggtgttcgtctagtgttgcttctacgtaaacttcgattcccatatattctttattgtcagaatcgcataccgatttatcatcatacactgtttgaaaactaaatggtatacacatcaaaataataaataataacgagtacattctgcaatattgttatcgtaattggaaaaatagtgttcgagtgagttggattatgtgagtattggattgtatattttattttatattttgtaataagaataaaatgctaatgtcaagtttattccaatagatgtcttattaaaaacatatataataaataacaatggctgaatggcataaaattatcgaggatatctcaaaaaataataagttcgaggatgccgccatcgttgattacaagactacaaagaatgttctagctgctattcctaacagaacatttgccaagattaatccgggtgaaattattcctctcatcactaatcgtaatattctaaaacctcttattggtcagaaatattgtattgtatatactaactctctaatggatgagaacacgtatgctatggagttgcttactgggtacgcccctgtatctccgatcgttatagcgagaactcataccgcacttatatttttgatgggtaagccaacaacatccagacgtgacgtgtatagaacgtgtagagatcacgctacccgtgtacgtgcaactggtaattaaaataaaaagtaatattcatatgtagtgtcaattttaaatgatgatgatgaaatggataatatccatattgacgatgtcaataatgccggtattggcatacagttcatcgatttttagatttcattcagaggatgtggaattatgttatgggcatttgtattttgataggatctataatgtagtaaatataaaatataatccgcatattccatatagatataattttattaatcgcacgttaaccgtagatgaactagacgataatgtcttttttacacatggttattttttaaaacacaaatatggttcacttaatcctagtttgattgtctcattatcaggaaacttaaaatataatgatatacaatgctcagtaaatgtatcgtgtctcattaaaaatttggcaacgagtacatctactatattaacatctaaacataagacttattctctacatcggtccacgtgtattactataataggatacgattctattatatggtataaagatataaatgacaagtataatgacatctatgattttactgcaatatgtatgctaatagcgtctacattgatagtgaccatatacgtgtttaaaaaaataaaaatgaactcttaattatgctatgctattagaaatggataaaatcaaaattacggttgattcaaaaattggtaatgttgttaccatatcgtataacttggaaaagataactattgatgtcacacctaaaaagaaaaaagaaaaggatgtattattagcgcaatcagttgctgtcgaagaggcaaaagatgtcaaggtagaagaaaaaaatattatcgatattgaagatgacgatgatatggatgtagaaagcgcgtaatacgatctataaaaataagtatataaatactttttatttactgtactcttactgtgtagtggtgataccctactcgattatttttttaaaaaaaaaatacttattctgattcttctagccatttccgtgttcgtttgaatgccacatcgacgtcaaagataggggagtagttgaaatctagttctgcattgttggtacgcacctcaaatgtagtgttggatatcttcaacgtatagttgttgagtagtgatggttttctaaatagaattctcttcatatcattcttgcacgcgtacatttttagcatccatcttggaatcctagatccttgttctattcccaatggtttcatcaatagaagattaaacatatcgtacgaacacgatggagagtaatcgtagcaaaagtaagcatttcctttaatcttagatcccggatactggatatattttgcagccaacacgtgcatccatgcagcatttcctacatatacccggctatgcaccgcgtcatcatcgactgtacgatacataatgttaccgtgttgcttacattgctcgtaaaagactttcatcaatttgtctccttctccgtaaattccagtgggtcttaggcaacaagtatacaattttgctccattcatgattacggaattattggctttcataaccagttgctcggccatacgtttactttttgcgtatacatgtcctggtgatatatcataaagggtatgctcatggccgatgaatggatcaccgtgtttattgggtcctattgcttccatgctactagtatagatcaaatacttgattcctaggtccacacaagctgccaaaatagtctgtgttccataatagtttactttcatgatttcattatcggtgtattttccaaatacatccactagagcagccgtatgaataatcagatttaccccatctagcgcttctctcaccttatcaaagtcgtttatatcacattgtatatagtttataaccttaactttcgaggttattggttgtggatcttctacaatatctatgactctgatttcttgaacatcatctgcactaattaacagttttactatatacctgcctagaaatccggcaccaccagtaaccgcgtacacggccattgctgccactcataatatcagactacttattctattttactaaataatggctgtttgtataatagaccacgataatatcagaggagttatttactttgaaccagtccatggaaaagataaagttttaggatcagttattggattaaaatccggaacgtatagtttgataattcatcgttacggagatattagtcaaggatgtgattccataggcagtccagaaatatttatcggtaacatctttgtaaacagatatggtgtagcatatgtttatttagatacagatgtaaatatatttacaattattggaaaggcgttatctatttcaaaaaatgatcagagattagcgtgtggagttattggtatttcttacataaatgaaaagataatacattttcttacaattaacgagaatggcgtttgatatatcagttaatgcgtctaaaacaataaatgcattagtttacttttctactcagcaaaataaattagtcatacgtaatgaagttaatgatacacactacactgtcgaatttgatagggacaaagtagttgacacgtttatttcatataatagacataatgacaccatagagataagaggggtgcttccagaggaaactaatattggttgcgcggttagtatgacttacttgtataataagtatagttttaaactgattttagcagaatatataagacacagaaatactatatccggcaatatttattcggcattgatgacactagatgatttggctattaaacagtatggagacattgatctattatttaatgagaaacttaaagtagactccgattcgggactatttgactttgtcaactttgtaaaggatatgatatgttgtgattctagaatagtagtagctctatctagtctagtatctaaacattgggaattgacaaataaaaaatataggtgtatggcattagccgaacatatatctgatagtattccaatatctgagctatctagactacgatacaatctatgtaagtatctacgcggacacactgagagcatagaggataaatttgattattttgaagacgatgattcgtctacatgttctgccgtaaccgacagggaaacggatgtataattttttttatagcgtgaaggatatgataaaaaatataattgttgtatttatcccattccaatcaccttatatgattctgtaacacaataaaggagtcttatagatgtatagaggtcagatactggtttgataaactgtttattccacataagtatgtttgactttatggttagacccgcatactttaacaaatcactgaaaattggagttaggtattgacctctcagaatcagttgccgttctggaacattaaatgtattttttatgatatactccaacgcatttatgtgggcatacaacaagtcattactaatggaatattccaagagttttagttgtctagtatttaacaagagaagagatttcaacagactgtttatgaactcgaatgccgcctcattgtcgcttatattgatgatgtcgaattctcccaatatcatcaccgatgagtagctcatcttgttatcgggatccaagttttctaaagatgtcattaaaccctcgatcatgaatggatttatcatcatcgtttttatgttggacatgagcttagtccgtttgtccacatctatagaagatgatttctgaattatttcatatatctctctctttaactccaggaacttgtcaggatggtctactttaatatgttctcgtctaagagatgaaaatctttggatggttgcacgcgacttttctctaaaggatgacgttgcccaagatcctctcttaaatgaatccatcttatccttggacaagatggacagtctattttccttagatggtttaatatttttgttacccatgatctataaaggtagacctaatcgtctcggatgaccatatatttattttcagttttattatacgcataaattgtaaaaaatatgttaggtttacgaaaatgtctcgtggggcattaatcgtttttgaaggattggacaaatctggaaaaacaacacaatgtatgaacatcatggaatcaataccttcaaacacaataaaataccttaactttcctcagagatccactgtcactggaaagatgatagatgactatctaactcgtaaaaaaacctataatgatcatatagttaatctattattttgtgcaaatagatgggagtttgcatcttttatacaagaacaactagaacagggaattactttaatagttgatagatacgcattttctggagtagcgtatgccgccgctaaaggcgcgtcaatgactctcagtaagagttatgaatctggattgcctaaacccgacttagttatattcttggaatctggtagcaaagaaattaatagaaacgtcggtgaggaaatttatgaagatgttacattccaacaaaaggtattacaagaatataaaaaaatgattgaagaaggagatattcattggcaaattatttcttctgaattcgaggaagatgtaaagaaggagttgattaagaatatagttatagaggctatacacacggttactggaccagtggggcaactgtggatgtaatagtgaaattacattttttataaatagatgttagtacagtgttataaatggatgaagcatattactctggcaacttggaatcagtactcggatacgtgtccgatatgcataccgaactcgcatcaatatctcaattagttattgccaagatagaaactatagataatgatatattaaacaaggacattgtaaattttatcatgtgtagatcaaacttggataatccatttatctctttcctagatactgtatatactattatagatcaagagaactatcagactgagttgattaattcattagacgacaatgaaattatcgattgtatagttaataagtttatgagcttttataaggataacctagaaaatatagtagatgctatcattactctaaaatatataatgaataatccagattttaaaactacgtatgccgaagtactcggttccagaatagccgatatagatattaaacaagtgatacgtaagaatatactacaattgtctaataatatccgcgaacgatatttgtgaaaatattaaaaaaaaatactttttttattaaatgacgtcttttcgtgaatttagaaaattatgctgtgctatatatcacgcatcaggatataaagaaaaatctaaattaattagagactttataacagatagggatgataaatatttgatcattaagctattgcttcccggattagacgatagaatttataacatgaacgataaacaaattataaaattatatagtataatatttaaacaatctcaggaagatatgctacaagatttaggatacggatatataggagacactattaggactttcttcaaagagaacacagaaatccgtccacgagataaaagcattttaactttagaagaagtggatagttttttaactacgttatcatccgtaactaaagaatcgcatcaaataaaattattgactgatgtagcatctgtttgtacatgtaatgatttaaaatgtgtagtcatgcttattgataaagatctaaaaattaaagcgggtcctcggtacgtacttaacgctattagtcctaatgcctatgatgtgtttagaaaatctaataacttgaaagagataatagaaaattcatctaaacaaaatctagactctatatctatttctgttatgactccaattaatcccatgttagcggaatcgtgtgattctgtcaataaggcgtttaaaaaatttccatcaggaatgtttgcggaagtcaaatacgatggtgaaagagtacaagttcataaaaataataacgagtttgccttctttagtagaaacatgaaaccagtactctctcataaagtggattatctcaaagaatacataccgaaagcatttaaaaaagctacgtctatcgtattggattctgaaattgttcttgtagacgaacataatgtaccgctcccgtttggaagtttaggtatacacaaaaagaaagaatataaaaactctaacatgtgtttgttcgtgtttgactgtttgtactttgatggattcgatatgacggacattccattgtacgaacgaagatcttttctcaaagatgttatggttgaaatacccaatagaatagtattctcagagttgacgaatattagtaacgagtctcagttaactgacgtattggatgatgcactaacgagaaaattagaaggattggtcttaaaagatattaatggagtatacgaaccgggaaagagaagatggttaaaaataaagcgagactatttgaacgagggttccatggcagattctgccgatttagtagtactaggtgcctactatggtaaaggagcaaagggtggtatcatggcagtctttctaatgggttgttacgacgatgaatccggtaaatggaagacggttaccaagtgttcaggacacgatgataatacgttaagggagttgcaagaccaattaaagatgattaaaattaacaaggatcccaaaaaaattccagagtggttagtagttaataaaatctatattcccgattttgtagtagaggatccgaaacaatctcagatatgggaaatttcaggagcagagtttacatcttccaagtcccataccgcaaatggaatatccattagatttcctagatttactaggataagagaggataaaacgtggaaagaatctactcatctaaacgatttagtaaacttgactaaatcttaatagttacatacaaactgaaaattaaaataacactatttagttggtggtcgccatggatggtgttattgtatactgtctaaacgcgctagtaaaacatggcgaggaaataaatcatataaaaaatgatttcatgattaaaccatgttgtgaaagagtttgtgaaaaagtcaagaacgttcacattggcggacaatctaaaaacaatacagtgattgcagatttgccatatatggataatgcggtatccgatgtatgcaattcactgtataaaaagaatgtatcaagaatatccagatttgctaatttgataaagatagatgacgatgacaagactcctactggtgtatataattattttaaacctaaagatgccattcctgttatcatatctataggaaaggataaagatgtctgtgaactattaatctcatcagacatatcgtgtgcatgcgtggagttaaattcatatcacgtagccattcttcccatggatgtttccttttttaccaaaggaaatgcatcattgattattctcctgtttgatttctctatcgatgcggcacctctcttaagaagtgtaaccgataataatgttattatatctagacaccagcgtctacatgacgagcttccgagttccaattggttcaagttttacataagtataaagtccgactattgttctatattatatatggttgttgatggatctgtgatgcatgcgatagctgataatagaactcacgcaattattagcaaaaatatattagacaatactacgattaacgatgagtgtagatgctgttattttgaaccacagattaggattcttgatagagatgagatgctcaatggatcatcgtgtgatatgaacagacattgtattatgatgaatttacctgatgtaggcgaatttggatctagtatgttggggaaatatgaacctgacatgattaagattgctctttcggtggctggtaatttaataagaaatcgagactacattcccgggagacgaggatatagctactacgtttacggtatagcctctagataatttttttaagcacgaaataaaaaacataattttaaaccaatctatttcatactattttgtgtgatcaccatggacataaagatagatattagtatttctggtgataaatttacggtgactactaggagggaaaatgaagaaagaaaaaaatatctacctctccaaaaagaaaaaactactgatgttatcaaacctgattatcttgagtacgatgacttgttagatagagatgagatgtttactattctagaggaatattttatgtacagaggtctattaggcctcagaataaaatatggacgactctttaacgaaattaaaaaattcgacaatgatgcggaagaacaattcggtactatagaagaactcaagcagaaacttagattaaattctgaagagggagcagataactttatagattatataaaggtacaaaaacaggatatcgtcaaacttactgtatacgattgcatatctatgataggattgtgtgcatgcgtggtagatgtttggagaaatgagaaactgttttctagatggaaatattgtttacgagcgattaaactgtttattgatgatcacatgcttgataagataaaatctatactgcagaatagactagtatatgtggaaatgtcatagaaagttaaaagttaatgagagcaaaaatatataaggttgtattccatatttgttatttttttctgtaatagttagaaaaatacattcgatggtctatctatcagattattatgtgttataaggtactttttctcataataaactagagtatgagtaagatagtgtttttcaaaacatataaatctaaaattgatggatgagatatacagctattaatttcgaaaatatattttaatctgataactttaaacatggatttttaatggtggtttaacgttttaaaaaaagattttgttattgtagtatatgataatattaaaagatggatataaagaatttgctgactgcatgtactattttttacattactacattggctacggcagatatacctacttcgtcactgccacacgctccggtaaacggggcatgtgacgagggagaatatcttgataagaggcataatcaatgttgtaatcagtgtccacctggagaatttgccaaggttagatgtaatggtaacgataacacaaaatgtgaacgctgcccacctcatacatataccgcaatccccaattactctaatggatgtcatcaatgtagaaaatgcccaacaggatcatttgataaggtaaagtgtaccggaacacagaacagtaaatgttcgtgtcttcctggttggtattgcgctactgattcttcacagactgaagattgtcgagattgtataccaaaaaggagatgtccatgcggatactttggtggaatagatgaacaaggaaatcctatttgtaaatcgtgttgtgttggtgaatattgcgactacctacgtaattatagacttgatccatttcctccatgcaaactatctaaatgtaattaattatgattttgatgataatgttaccatacattatatcgctacttggttagtgtattattcagtatgaagacctattaataattacttatcttttgacgatcttgttataattataatataaaaatacttatggcatagtaactcataattgctgacgcgataaattcgtaataatctgttttgttcaaatttttataaggaatctacaggcataaaaataaaaatataatttataatatactcttacagcgcgccatcatgaataacagcagtgaattgattgctgttattaatggatttagaaatagtggacgattttgtgatattaatatagttattaatgatgaaaggataaacgctcacagactcatcctatctggagcctccgaatatttttccattctgttttccaataattttatcgattctaatgaatacgaagttaatctaagtcatttagattatcaaagtgttaacgatttgatcgattacatttatgggatacctttgagcctaactaacgataacgtgaaatatattctttcaaccgctgattttttacaaattggatctgctattacggagtgtgaaaattacatacttaaaaatctttgttctagaaactgtatcgatttctacatatacgctgataaatataataacaagaaaatagaatcagcgtcgtttaacacaatattacaaaatattttgagactcatcaacgatgaaaactttaaatacttaacagaggaatcaatgataaaaattttaagcgatgatatgttaaatataaaaaatgaggatttcgccccactaattctcattaaatggttagagagtactcaacaaccatgcaccgtcgagttacttaaatgcctcagaatatcattgctttccccacaagttataaaatcactttatagtcatcgactggttagttcaatctacgaatgtataacattcttaaacaatatagcattcttggatgaatcatttcctagataccatagcatcgagttgatatctatcggtataagtaattcgcatgataagatttccataaactgctacaatcataaaaaaaatacatgggaaatgatatcttcacgtagatataggtgtagtttcgcagtggccgtcctggataatattatctatatgatgggtggatatgatcagtccccgtatagaagttcaaaggttatagcgtacaatacatgtacaaattcttggatatatgatataccagagctaaaatatcctcgttctaattgtgggggactggctgatgacgaatacatttattgtataggcggcatacgcgatcaggattcatcgttgacatctagtattgatagatggaagccatcaaaaccatattggcagaagtatgctaaaatgcgcgaaccaaaatgtgatatgggggttgcgatgttaaacggattaatatatgttataggtggaatcgttaaaggtgacacgtgtaccgacgcactagagagtttatcagaagatggatggatgaagcatcaacgtcttccaataaaaatgtccaatatgtcgacgattgttcatgatggcaagatttatatatctggaggttacaacaatagtagtgtagttaatgtaatatcgaatctagtccttagctataattcgatatatgatgaatggaccaaattatcatcattaaacattcctagaattaatcccgctctatggtcagcgcataataaattatatgtaggaggaggaatatctgatgatgttcgaactaatacatctgagacatacgacaaagaaaaagattgttggacattggataatggtcacgtgttaccacgcaattatataatgtataaatgcgaaccgattaaacataaatatccattggaaaaaacacagtacacgaatgattttctaaagtatttggaaagttttataggtagttgatagaacaaaatacataattttgtaaaaataaatcactttttatactaatatgacacgattaccaatacttttgttactaatatcattagtatacgctacaccttttcctcagacatctaaaaaaataggtgatgatgcaactctatcatgtaatcgaaataatacaaatgactacgttgttatgagtgcttggtataaggagcccaattccattattcttttagctgctaaaagcgacgtcttgtattttgataattataccaaggataaaatatcttacgactctccatacgatgatctagttacaactatcacaattaaatcattgactgctagagatgccggtacttatgtatgtgcattctttatgacatcaactacaaatgacactgataaagtagattatgaagaatactccacagagttgattgtaaatacagatagtgaatcgactatagacataatactatctggatctacacattcaccggaaactagttctaagaaacctgattatatagataattctaattgctcgtcggtattcgaaatcggtacccggggatcagcttgcatgcctgcagcaattcccgaggctgtagccgacgatggtgcgccaggagagttgttgattcattgtttgcctccctgctgcggtttttcaccgaagttcatgccagtccagcgtttttgcagcagaaaagccgccgacttcggtttgcggtcgcgagtgaagatccctttcttgttaccgccaacgcgcaatatgccttgcgaggtcgcaaaatcggcgaaattccatacctgttcaccgacgacggcgctgacgcgatcaaagacgcggtgatacatatccagccatgcacactgatactcttcactccacatgtcggtgtacattgagtgcagcccggctaacgtatccacgccgtattcggtgatgataatcggctgatgcagtttctcctgccaggccagaagttctttttccagtaccttctctgccgtttccaaatcgccgctttggacataccatccgtaataacggttcaggcacagcacatcaaagagatcgctgatggtatcggtgtgagcgtcgcagaacattacattgacgcaggtgatcggacgcgtcgggtcgagtttacgcgttgcttccgccagtggcgcgaaatattcccgtgcaccttgcggacgggtatccggttcgttggcaatactccacatcaccacgcttgggtggtttttgtcacgcgctatcagctctttaatcgcctgtaagtgcgcttgctgagtttccccgttgactgcctcttcgctgtacagttctttcggcttgttgcccgcttcgaaaccaatgcctaaagagaggttaaagccgacagcagcagtttcatcaatcaccacgatgccatgttcatctgcccagtcgagcatctcttcagcgtaagggtaatgcgaggtacggtaggagttggccccaatccagtccattaatgcgtggtcgtgcaccatcagcacgttatcgaatcctttgccacgcaagtccgcatcttcatgacgaccaaagccagtaaagtagaacggtttgtggttaatcaggaactgttcgcccttcactgccactgaccggatgccgacgcgaagcgggtagatatcacactctgtctggcttttggctgtgacgcacagttcatagagataaccttcacccggttgccagaggtgcggattcaccacttgcaaagtcccgctagtgccttgtccagttgcaaccacctgttgatccgcatcacgcagttcaacgctgacatcaccattggccaccacctgccagtcaacagacgcgtggttacagtcttgcgcgacatgcgtcaccacggtgatatcgtccacccaggtgttcggcgtggtgtagagcattacgctgcgatggattccggcatagttaaagaaatcatggaagtaagactgctttttcttgccgttttcgtcggtaatcaccattcccggcgggatagtctgccagttcagttcgttgttcacacaaacggtgatacgtacacttttcccggcaataacatacggcgtgacatcggcttcaaatggcgtatagccgccctgatgctccatcacttcctgattattgacccacactttgccgtaatgagtgaccgcatcgaaacgcagcacgatacgctggcctgcccaacctttcggtataaagacttcgcgctgataccagacgttgcccgcataattacgaatatctgcatcggcgaactgatcgttaaaactgcctggcacagcaattgcccggctttcttgtaacgcgctttcccaccaacgctgatcaattccacagttttcgcgatccagactgaatgcccacaggccgtcgagttttttgatttcacgggttggggtttctacaggacgtaacattctagtcgaggaattcatttatagcatagaaaaaaacaaaatgaaattctactatatttttacatacatatattctaaatatgaaagtggtgattgtgactagcgtagcatcgcttctagacatctatatactatatagtaataccaatactcaagactacgaaactgatacaatctcttatcatgtgggtaatgttctcgatgtcgatagccatatgcccggtagttgcgatatacataaactgatcactaattccaaacccacccgctttttatagtaagtttttcacccataaataataaatacaataattaatttctcgtaaaagtagaaaatatattctaatttattgcacggtaaggaagtagaatcataaagaacagtgacggatccccgatccccgacctgcaggcatgcaagctcgactccggaaccaattactgataatgtagaagatcatacagacaccgtcacatacactagtgatagcattaatacagtaagtgcatcatctggagaatccacaacagacgagactccggaaccaattactgataaagaagatcatacagttacagacactgtctcatacactacagtaagtacatcatctggaattgtcactactaaatcaaccaccgatgatgcggatctttatgatacgtacaatgataatgatacagtaccaccaactactgtaggcggtagtacaacctctattagcaattataaaaccaaggactttgtagaaatatttggtattaccgcattaattatattgtcggccgtggcaattttctgtattacatattatatatataataaacgttcacgtaaatacaaaacagagaacaaagtctagatttttgacttacataaatgtctgggatagtaaaatctatcatattgagcggaccatctggtttaggaaagacagccatagccaaaagactatgggaatatatttggatttgtggtgtcccataccactagatttcctcgtcctatggaacgagaaggtgttgattaccattacgttaacagagaggccatctggaagggaatagccgccggaaactttctagaacatactgagtttttaggaaatatttacggaacttctaaaacagctgtgaatacagcggctattaataatcgtatttgtgtgatggatctaaacatcgacggtgttagaagtcttaaaaatacgtacctaatgccttactcggtgtatataagacctacctctcttaaaatggttgagaccaagcttcgtcgtagaaacactgaagctaacgatgagattcatcgtcgtgtgatgttggcaaaaactgacatggatgaggcaggtgaagccggtctattcgacactattatcattgaagatgatgtgaatttagcatatagtaagttaattcagatactacaggaccgtattagaatgtattttaacactaattagagacttaagacttaaaacttgataattaataatataactcgtttttatatgtgtctatttcaacgtctaatgtattagttaaatattaaaacttaccacgtaaaacttaaaatttaaaatgatatttcattgacagatagatcacacattatgaactttcaaggacttgtgttaactgacaattgcaaaaatcaatgggtcgttggaccattaataggaaaaggtggattcggtagtatttatactactaatgacaataattatgtagtaaaaatagagcccaaagctaacggatcattatttaccgaacaggcattttatactagagtacttaaaccatccgttatcgaagaatggaaaaaatctcacaatataaagcacgtaggtcttatcacgtgcaaggcatttggtctatacaaatccattaatgtggaatatcgattcttggtaattaatagattaggtgcagatctagatgcggtgatcagagccaataataatagactaccaaaaaggtcggtgatgttgatcggaatcgaaatcttaaataccatacaatttatgcacgagcaaggatattctcacggagatattaaagcgagtaatatagtcttagatcaaatagataagaataaattatatctagtggattacggattggtttctaaattcatgtctaatggcgaacatgttccatttataagaaatccaaataaaatggataacggtactctagaatttacacctatagattcgcataaaggatacgttgtatctagacgtggagatctagaaacacttggatattgtatgattagatggttgggaggtatcttaccatggactaagatatctgaaacaaagaattgtgcattagtaagtgccacaaaacagaaatatgttaacaatactgcgactttgttaatgaccagtttgcaatatgcacctagagaattgctgcaatatattaccatggtaaactctttgacatattttgaggaacccaattacgacaagtttcggcacatattaatgcagggtgtatattattaagtgtggtgtttggtcgataaaaattaaaaaataacttaatttattattgatctcgtgtgtacaaccgaaatcatggcgatgttttacgcacacgctctcggtgggtacgacgagaatcttcatgcctttcctggaatatcatcgactgttgccaatgatgtcaggaaatattctgttgtgtcagtttataataacaagtatgacattgtaaaagacaaatatatgtggtgttacagtcaggtgaacaagagatatattggagcactgctgcctatgtttgagtgcaatgaatatctacaaattggaaatccgatccatgatcaagaaggaaatcaaatctctatcatcacatatcgccacaaaaactactatgctctaagcggaatcgggtacgagagtctagacttgtgtttggaaggagtagggattcatcatcacgtacttgaaacaggaaacgctgtatatggaaaagttcaacatgattattctactatcaaagagaaggccaaagaaatgagtgcacttagtccaggacctatcatcgattaccacgtctggataggagattgtatctgtcaagttactgctgtggacgtacatggaaaggaaattatgaaaatgagattcaaaaagggtgcggtgcttccgatcccaaatctggtaaaagttaaacttggggagaatgatacagaaaatctttcttctactatatcggcggcaccatcgaggtaaccacctctctggaagacagcgtgaatcatgtactcatgaaacgtttggaaactatacgccatatgtggtctgttgtatatgatcattttgatattgtgaatggtaaagaatgctgttatgtgcatacgcattcatctaatcaaaatcctataccgagtactgtaaaaacaaatttgtacatgaagactatgggatcatgcattcaaatggattccatggaagctctagagtatcttagcgaactgaaggaatcaggtggatggagtcccagaccagaaatgcaggaatttgaatatccagatggagtggaagacactgaatcaattgagagattggcagaggagttcttcaatagatcagaacttcaggctggtgaatcagtcaaatttggtaattctattaattgttaaacatacatctgtttcagctaagcaactaagaacacgtatacggcagcagcttccttctatactctcatcttttaccaacacaaagggtggatatttgttcattggagttgataataatacacacaaagtatttggattcacggtgggttacgactacctcagactgatagagaatgatatagaaaagcatatcaaaagacttcgtgttgtgcatttctgtgagaagaaagaggacatcaagtacgcgtgtcgattcatcaaggtatataaacctggggatgagactacctcgacatacgtgtgcgctatcaaagtggaaagatgctgttgtgctgtgtttgcagattggccagaatcatggtatatggatactaatggtatcaagaagtattctccagatgaatgggtgtcacatataaaattttaattaatgtaactatagagaacaaataataaggttgtaatatcatatagacaataactaacaattaattagtaactgttatctcttttttaactaaccaactaactatatacctattaatacatcgtaattatagttcttaacatctattaatcattaattcgcttctttaattttttataaactaacattgttaattgaaaagggataacatgttacagaatataaattatatatggatttttttaaaaaggaaatacttgactggagtatatatttatctcttcattatatagcacgcgtgttttccaatttttccacatcccatataatacaggattataatctcgttcgaacatacgagaaagtggataaaacaatagttgattttttatctaggttgccaaatttattccatattttagaatatggggaaaatattctacatatttattctatggatgatgctaatacgaatattataattttttttctagatagagtattaaatattaataagaacgggtcatttatacacaatctcgggttatcatcatccattaatataaaagaatatgtatatcaattagttaataatgatcatccagataataggataagactaatgcttgaaaatggacgtagaacaagacattttttgtcctatatatcagatacagttaatatctatatatgtattttaataaatcatggattttatatagatgccgaagacagttacggttgtacattattacatagatgtatatatcactataagaaatcagaatcagaatcatacaatgaattaattaagatattgttaaataatggatcagatgtagataaaaaagatacgtacggaaacacaccttttatcctattatgtaaacacgatatcaacaacgtggaattgtttgagatatgtttagagaatgctaatatagactctgtagactttaatagatatacacctcttcattatgtctcatgtcgtaataaatatgattttgtaaagttattaatttctaaaggagcaaatgttaatgcgcgtaataaattcggaactactccattttattgtggaattatacacggtatctcgcttataaaactatatttggaatcagacacagagttagaaatagataatgaacatatagttcgtcatttaataatttttgatgctgttgaatctttagattatctattatccagaggagttattgatattaactatcgtactatatacaacgaaacatctatttacgacgctgtcagttataatgcgtataatacgttggtctatctattaaacaaaaatggtgattttgagacgattactactagtggatgtacatgtatttcggaagcagtcgcaaacaacaacaaaataataatggaagtactattgtctaaacgaccatctttgaaaattatgatacagtctatgatagcaattactaaacataaacagcataatgcagatttattgaaaatgtgtataaaatatactgcgtgtatgaccgattatgatactcttatagatgtacagtcgctacagcaatataaatggtatattttaagatgtttcgatgaaatagatatcatgaagagatgttatataaaaaataaaactgtattccaattagttttttgtatcaaagacattaatactttaatgagatacggtaaacatccttctttcgtgaaatgcactagtctcgacgtatacggaagtcgtgtacgtaatatcatagcatctattagatatcgtcagagattaattagtctattatccaagaagctggatcctggagataaatggtcgtgttttcctaacgaaataaaatataaaatattggaaaactttaacgataacgaactatccacatatctaaaaatcttataaacattattaaaatataaaatctaagtaggataaaatcacactacatcattgtttccttttagtgctcgacagtgtatactatttttaacgctcataaataaaaatgaaaacgatttccgttgttacgttgttatgcgtactacctgctgttgtttattcaacatgtactgtacccactatgaataacgctaaattaacgtctaccgaaacatcgtttaatgataaccagaaagttacgtttacatgtgatcagggatatcattctttggatccaaatgctgtctgtgaaacagataaatggaaatacgaaaatccatgcaaaaaaatgtgcacagtttctgattatgtctctgaactatataataaaccgctatacgaagtgaattccaccatgacactaagttgcaacggcgaaacaaaatattttcgttgcgaagaaaaaaatggaaatacttcttggaatgatactgttacgtgtcctaatgcggaatgtcaacctcttcaattagaacacggatcgtgtcaaccagttaaagaaaaatactcatttggggaatatatgactatcaactgtgatgttggatatgaggttattggtgcttcgtacataagttgtacagctaattcttggaatgttattccatcatgtcaacaaaaatgtgatatgccgtctctatctaacggattaatttccggatctacattttctatcggtggcgttatacatcttagttgtaaaagtggttttacactaacggggtctccatcatccacatgtatcgacggtaaatggaatcccatactcccaatatgtgtacgaactaacgaaaaatttgatccagtggatgatggtcccgacgatgagacagatttgagcaaactctcgaaagacgttgtacaatatgaacaagaaatagaatcgttagaagcaacttatcatataatcatagtggcgttgacaattatgggcgtcatatttttaatctccgttatagtattagtttgttcctgtgacaaaaataatgaccaatataagttccataaattgctaccgtaaatataaatccgttaaaataattaataatttaataacaaacaagtatcaaaagattaaagacttatagctagaatcaattgagatgtcttcttcagtggatgttgatatctacgatgccgttagagcatttttactcaggcactattataacaagagatttattgtgtatggaagaagtaacgccatattacataatatatacaggctatttacaagatgcgccgttataccgttcgatgatatagtacgtactatgccaaatgaatcacgtgttaaacaatgggtgatggatacacttaatggtataatgatgaatgaacgcgatgtttctgtaagcgttggcaccggaatactattcatggaaatgtttttcgattacaataaaaatagtatcaacaatcaactaatgtatgatataattaatagcgtatctataattctagctaatgagagatatagaagcgcttttaacgacgatggtatatacatccgtagaaatatgattaacaagttgtacggatacgcatctctaactactattggcacgatcgctggaggtgtttgttattatctgttgatgcatctagttagtttgtataaataattatttcaatatactagttaaaattttaagattttaaatgtataaaaaactaataacgtttttatttgtaataggtgcattagcatcctattcgaataatgagtacactccgtttaataaactgagtgtaaaactctatatagatggagtagataatatagaaaattcatatactgatgataataatgaattggtgttaaattttaaagagtacacaatttctattattacagagtcatgcgacgtcggatttgattccatagatatagatgttataaacgactataaaattattgatatgtataccattgactcgtctactattcaacgcagaggtcacacgtgtagaatatctaccaaattatcatgccattatgataagtacccttatattcacaaatatgatggtgatgagcgacaatattctattactgcagagggaaaatgctataaaggaataaaatatgaaataagtatgatcaacgatgatactctattgagaaaacatactcttaaaattggatctacttatatatttgatcgtcatggacatagtaatacatattattcaaaatatgatttttaaaaatttaaaatatattatcacttcagtgacagtagtcaaataacaaacaacaccatgagatatattataattctcgcagttttgttcattaatagtatacatgctaaaataactagttataagtttgaatccgtcaattttgattccaaaattgaatggactggggatggtctatacaatatatcccttaaaaattatggcatcaagacgtggcaaacaatgtatacaaatgtaccagaaggaacatacgacatatccgcatttccaaagaatgatttcgtatctttctgggttaaatttgaacaaggcgattataaagtggaagagtattgtacgggactatgcgtcgaagtaaaaattggaccaccgactgtaacattgactgaatacgacgaccatatcaatttgtacatcgagcatccgtatgctactagaggtagcaaaaagattcctatttacaaacgcggtgacatgtgtgatatctacttgttgtatacggctaacttcacattcggagattctaaagaaccagtaccatatgatatcgatgactacgattgcacgtctacaggttgcagcatagactttgtcacaacagaaaaagtgtgcgtgacagcacagggagccacagaagggtttctcgaaaaaattactccatggagttcgaaagtatgtctgacacctaaaaagagtgtatatacatgcgcaattagatccaaagaagatgttcccaatttcaaggacaaaatggccagagttatcaagagaaaatttaatacacagtctcaatcttatttaactaaatttctcggtagcacatcaaatgatgttaccacttttcttagcatgcttaacttgactaaatattcataactaatttttattaatgatacaaaaacgaaataaaactgcatattatacactggttaacgcccttataggctctaaccattttcaagatgaggtccctgattatagtccttctgttcccctctatcatctactccatgtctattagacgatgtgagaagactgaagaggaaacatggggattgaaaatagggttgtgtataattgccaaagatttctatcccgaaagaactgattgcagtgttcatctcccaactgcaagtgaaggattgataactgaaggcaatggattcagggatatacgaaacaccgataaattataaaaaaagcaatgtgtccgctgtttccgttaataatactattttcgtaactggcggattattcataaataactctaatagcacgatcgtggttaacaatatggaaaaacttgacatttataaagacaaacaatggtcgattatagaaatgcctatggctagggtatatcacggcattgactcgacatttggaatgttatattttgccggaggtctatccgttaccgaacaatatggtaatttagagaaaaacaacgagatatcttgttacaatcctagaacgaataagtggtttgatatttcatatactatttataagatatccatatcatcattgtgtaaactaaataacgtcttctatgtatttagtaaggacattggatatgtggaaaagtatgatggtgcatggaagttagtacatgatcgtctccccgctataaaggcattatcaacttctccttattgattgaaaatgaaaatataaatagtttttatgtatagcagtattaccctatagttttattgcttactactaacatggatacagatgttacaaatgtagaagatatcataaatgaaatagatagagagaaagaagaaatactaaaaaatgtagaaattgaaaataataaaaacattaacaagaatcatcccaatgaatatattagagaagcactcgttattaataccagtagtaatagtgattccattgataaagaagttatagaatgtatcagtcacgatgtaggaatatagatcatatctactaatttttataatcgatacaaaacataaaaaacaactcgttattacatagcaggcatggaatccttcaagtattgttttgataacgatggcaagaaatggattatcggaaatactttatattctggtaattcaatactctataaggtcagaaaaaatttcactagttcgttctacaattacgtaatgaagatagatcacaaatcacacaagccattgttgtctgaaatacgattctatatatctgtattggatcctttgactatcgacaactggacacgggaacgtggtataaagtatttggctattccagatctgtatggaattggagaaaccgatgattatatgttcttcgttataaagaattcgggaagagtattcgccccaaaggatactgaatcagtcttcgaagcatgcgtcactatgataaacacgttagagtttatacactctcgaggatttacccatggaaaaatagaaccgaggaatatactgattagaaataaacgtctttcactaattgactattctagaactaacaaactatacaagagtggaaactcacatatagattacaacgaggacatgataacttcaggaaatatcaattatatgtgtgtagacaatcatcttggagcaacagtttcaagacgaggagatttagaaatgttgggatattgcatgatagaatggttcggtggcaaacttccatggaaaaacgaaagtagtataaaagtaataaaacaaaaaaaagaatataaaaaatttatagctactttctttgaggactgttttcctgaaggaaatgaacctctggaattagttagatatatagaattagtatacacgttagattattctcaaactcctaattatgacagactacgtaaactgtttatacaagattgaaattatattcttttttttatagagtgtggtagtgttacggatatctaatattaatattagactatctctatcgcgctacacgaccaatatcgattactatggatatcttctatgaaaggagagaatgtatttatttctccagcgtcaatctcgtcagtattgacaatactgtattatggagctaatggatccactgctgaacagctatcaaaatatgtagaaacggaggagaacacggataaggttagcgctcagaatatctcattcaaatccatgaataaagtatatgggcgatattctgccgtgtttaaagattcctttttgagaaaaattggcgataagtttcaaactgttgacttcactgattgtcgcactatagatgcaatcaacaagtgtgtagatatctttactgaggggaaaatcaatccactattggatgaaccattgtctcctagcaattagtgccgtatactttaaagcaaaatggttgacgccattcgaaaaggaatttaccagtgattatcccttttacgtatctccgacggaaatggtagacgtaagtatgatgtctatgtacggcaaggcatttaatcacgcatctgtaaaagaatcattcggcaacttttcaatcatagaactgccatatgttggagatactagtatgatggtcattcttccagacaagattgatggattagaatccatagaacaaaatctaacagatacaaattttaagaaatggtgtgactttatggatgctatgtttatagatgttcacattcccaagtttaaggtaacaggctcgtataatctggtggatactctagtaaagtcaggactgacagaggtgttcggttcaactggagattatagcaatatgtgtaatttagatgtgagtgtcgacgctatgatccacaaaacgtatatagatgtcaatgaagagtatacagaagcagctgcagcaacttctgtactagtggcagactgtgcatcaacaattacaaatgagttctgtgcagatcatccgttcatctatgtgattaggcatgttgatggaaaaattcttttcgttggtagatattgctctccgacaactaattgttaaccattttttttaaaaaaaatagaaaaaacatgtggtattagtgcaggtcgttgttcttccaattgcaattggtaagatgacggccaactttagtacccacgtcttttcaccacagcactgtggatgtgacagactgaccagtattgatgacgtcaaacaatgtttgactgaatatatttattggtcgtcctatgcataccgcaacaggcaatgcgctggacaattgtattccacactcctctcttttagagatgatgcggaattagtgttcatcgacattcgcgagctggtaaaaaatatgccgtgggatgatgtcaaagattgtacagaaatcatccgttgttatataccggatgagcaaaaaaccatcagagagatttcggccatcatcggactttgtgcatatgctgctacttactggggaggtgaagaccatcccactagtaacagtctgaacgcattgtttgtgatgcttgagatgctaaattacgtggattataacatcatattccggcgtatgaattgatgagttgtacatcttgacattttctttcttctcttctccctttcttctcttctcccttcctccctcttctccctttcccagaaacaaacttttttacccactataaaataaaatgagtatactacctattatatttcttcctatatttttttattcttcattcgttcagacttttaacgcgtctgaatgtatcgacaaagggcaatattttgcatcattcatggagttagaaaacgagccagtaatcttaccatgtcctcaaataaatacgctatcatccggatataatatattagatattttatgggaaaaacgaggagcggataatgatagaattataccgatagataatggtagcaatatgctaattctgaacccgacacaatcagactctggtatttatatatgcattaccacgaacgaaacctactgtgacatgatgtcgttaaatttgacaatcgtgtctgtctcagaatcaaatatagatcttatctcgtatccacaaatagtaaatgagagatctactggcgaaatggtatgtcccaatattaatgcatttattgctagtaacgtaaacgcagatattatatggagcggacatcgacgccttagaaataagagacttaaacaacggacacctggaattattaccatagaagatgttagaaaaaatgatgctggttattatacatgtgttttagaatatatatacggtggcaaaacatataacgtaaccagaattgtaaaattagaggtacgggatagaataataccttctactatgcaattaccagatggcattgtaacttcaataggtagtaatttgactattgcatgcagagtatcgttgagacctcccacaacggacaccgacgtcttttggataagtaatggtatgtattacgaagaagatgatggggacggaaacggtagaataagtgtagcaaataaaatctatatgaccgataagagacgtgttattacatcccggttaaacattaatcctgtcaaggaagaagatgctacaacgtttacgtgtatggcgtttactattcctagcatcagcaaaacagttactgttagtataacgtgaatgtatgttgttacatttccatgtcaattgagtttataagaatttttatacattatcttccaacaaacaattgacgaacgtattgctatgattaactcccacgatactatgcatattattaatcattaacttgcagactatacctagtgctattttgacatactcgtgttcttgtgtaattgcggtatctatattattaaagtacgtaaatctagctatagttttattatttaattttagataatataccgtctccttatttttaaaaattgccacatcctttattaaatcatgaatgggaatttctatgtcatcgttagtatattgtgaacaacaagagcagatatctataggaaagggtggaatgcgatacattgatctatgtagttttaaaacacacgcgaactttgaagaatttatataaatcattccatcgatacatccttctatgttgacatgtatatatccaggaattcttttattaatgtcaggaaatgtataaactaaaacattgcccgaaagcggtgcctctatctgcgttatatccgttcttaacttacaaaatgtaaccaatacctttgcatgacttgttttgttcggcaacgttagtttaaacttgacgaatggattaattacaatagcatgatccgcgcatctattaagtttttttactttaacgcccttgtatgtttttacagagactttatctaaatttctagtgcttgtatgtgttataaatataacgggatatagaaccgaatcacctaccttagatacccaattacattttatcagatccagataataaacaaattttgtcgccctaactaattctatattgttatatattttacaattggttatgatatcatgtaataacttggagtctaacgcgcatcgtcgtacgtttatacaattgtgatttagtgtagtatatctacacatgtatttttccgcactatagtattctggactagtgataaaactatcgttatatctgtcttcaatgaactcatcgagatattgctctctgtcatattcatacacctgcataaactttctagacatcttacaatccgtgttattttaggatcatatttacatatttacgggtatatcaaagatgttagattagttaatgggaatcgtctataataatgaatattaaacaattatatgaggacttttaccacaaagcatcataaaaatgagtcgtcgtctgatttatgttttaaatatcaaccgcaaatcaactcataaaatacaagagaatgaaatatatacatattttagtcattgcaatatagaccatacttctacagaacttgattttgtagttaaaaactatgatctaaacagacgacaacctgtaactgggtatactgcactacactgctatttgtataataattactttacaaacgatgtactgaagatattattaaatcatgacgtaaatgtaacgatgaaaaccagtagcggacgtatgcctgtttatatattgcttactagatgttgtaatatttcacatgatgtagtgatagatatgatagacaaagataaaaaccacttattacatagagactattccaacctattactagagtatataaaatctcgttacatgttattgaaggaagaggatatcgatgagaacatagtatccactttattagataagggaatcgatcctaactttaaacaagacggatatacagcgttacattattattatttgtgtctcgcacacgtttataaactaggtgagtgtagaaaaccgataacgataaaaaaggccaagcgaattatttctttgtttatacaacatggagctaatctaaacgcgttagataattgtggtaatacaccattccatttgtatcttagtattgaaatgtgtaataatattcatatgactaaaatgctgttgacttttaatccgaatttcaaaatatgtaataatcatggattaacgcctatactatgttatataacttccgactacatacaacacgatattcttgttatgttaatacatcactatgaaacaaatgttggagaaatgccgatagatgagcgtcgtatgatcgtattcgagtttatcaaaacatattctacacgtccggcagattcgataacttatttgatgaataggtttaaaaatataaatatttatacccgctatgaaggaaagacattattacacgtagcatgtgaatataataatacacaagtaatagattatcttatacgtatcaacggagatataaatgcgttaaccgacaataacaaacacgctacacaactcattatagataacaaagaaaattccccatataccattaattgtttactgtatatacttagatatattgtagataagaatgtgataagatcgttggtggatcaacttccatctctacctatcttcgatataaaatcatttgagaaattcatatcctactgtatacttttagatgacacattttacgataggcacgttaagaatcgcgattctaaaacgtatcgatacgcattttcaaaatacatgtcgtttgataaatacgatggtataataactaaatgtcacgacgaaacaatgttactcaaactgtccactgttctagacactacactatatgcagttttaagatgtcataattcgagaaagttaagaagatacctcaacgagttaaaaaaatataataacgataagtcctttaaaatatattctaatattatgaatgagagataccttaatgtatattataaagatatgtacgtgtcaaaggtatatgataaactatttcctgttttcacagataaaaattgtctactaacattactaccttcagaaattatatacgaaatattatacatgctgacaattaacgatctttataatatatcgtatccacctaccaaagtatagttgtatttttctcatgcgatgtgtgtaaaaaaactgatattatataaatattttagtgccgtataataaagatgacgatgaaaatgatggtacatatatatttcgtatcattattgttattgctattccacagttacgccatagacatcgaaaatgaaatcacagaattcttcaataaaatgagagatactctaccagctaaagactctaaatggttgaatccagcatgtatgttcggaggcacaatgaatgatatagccgctctaggagagccattcagcgcaaagtgtcctcctattgaagacagtcttttatcgcacagatataaagactatgtggttaaatgggagaggctagaaaagaatagacggcgacaggtttctaataaacgtgttaaacatggtgatttatggatagccaactatacatctaaattcagtaaccgtaggtatttgtgcaccgtaactacaaagaatggtgactgtgttcagggtatagttagatctcatattaaaaaacctccttcatgcattccaaaaacatatgaactaggtactcatgataagtatggcatagacttatactgtggaattctttacgcaaaacattataataatataacttggtataaagataataaggaaattaatatcgacgacattaagtattcacaaacgggaaaggaattaattattcataatccagagttagaagatagcggaagatacgactgttacgttcattacgacgacgttagaatcaagaatgatatcgtagtatcaagatgtaaaatacttacggttataccgtcacaagaccacaggtttaaactaatactagatccgaaaatcaacgtaacgataggagaacctgccaatataacatgcactgctgtgtcaacgtcattattgatcgacgatgtactgattgaatgggaaaatccatccggatggcttataggattcgattttgatgtatactctgttttaactagtagaggcggtatcaccgaggcgaccttgtactttgaaaatgttactgaagaatatataggtaatacatataaatgtcgtggacacaactattattttgaaaaaacccttacaactacagtagtattggagtaaatatacaatgcatttttatatacattactgaattattattactgaattattattactgaattattattaattatatcgtatttgtgctatagaatggatgaagatacgcgactatctaggtatttgtatctcaccgatagagaacatataaatgtagactctattaaacagttgtgtaaaatatcagatcctaatgcatgttatagatgtggatgtacggctttacatgagtacttttataattatagatcagtcaacggaaaatacaagtatagatacaacggttactatcaatattattcatctagcgattatgaaaattataatgaatattattatgatagaactggtatgaacagtgagagtgataatatatcaatcaaaacagaatatgaattctatgatgaaacacaagatcaaagtacacaactagtaggttacgacattaaactcaaaaccaatgaggatgattttatggctatgatagatcagtgggtgtccatgattatatagatgaatcaattaataaagtagtatatggaagagagtctcacgtaagatggcgggatatatggcaagaacataatgatggcgtatacagtataggaaaggagtgcatagataatatatacgaagacaaccataccgtagacgaattctacaagatagacagcgtatcagatgtagatgacgcggaacacatatctccgataactaaaaaaccatagaatcagttgatgataatacctacatttctaatcttccgtataccatcaaatacaaaatattcgagcaacaataagtattttttatacctttaaaactgataaataaattttttctagtgatattttggcaagatgagaatcctatttctcatcgctttcatgtatgggtgtgttcactcatatgttaacgcggttgaaaccaaatgtccaaatctagacattgtaacatcttctggagaatttcattgttcaggatgtgtggaacatatgcctgagtttagctatatgtattggttggcaaaggatatgaaatcggacgaggataccaagtttatagaacatctgggtgatggcatcaaagaagatgaaaccgttcgtaccacagatagtggaatcgtcactctacgtaaagtccttcatgtgactgatactaataaatttgataattataggttcacttgtgtcctcgctacgctagatggcatttataaaaagaatgtttgctgaagtagttgtgtgctactatttttatttatgatataatctaatggaattaatttgaattgatatttatccaatactaaagattatattagaatcaaattaatcttttatacgagaaaaaataacgacatacgtcgtcaacaaattaaactttttatttattagttaactagcttatagaacttgctcattgttatgtttctaaaacgggtacggcatataggacaattatccgacgcaccggtttctcttcgtgttctatgccatatattgatgcatgttatgcaaaatatatgagtacacgaatccaataaaccaaagtatctatcgttttgagtaaacaacttcatagcaaattccacattctttttctttacttactctatacacgtcctcgtatttatttagtattttgatgatatccaactcagaaatggttgttgtattattgggtgtatttggagtataggtattattagctatgtaccaatttaccaaccctcttaatattgattgataatcacatcggttatccaattaataactaaattgtagtgtatatatagaccatatatgtttctatttttttgacagttacgtatagtttcagtaagttttgattgttgtattcctgtatctctagataagttagtcatatagtcccttccggcgatacgttttttccaagcccgaaattgattagccaaatgtgtatttatttttgtgatattgatataatatttcggataatgcatactgttagtcttatatcatttggttcatctatgtattgtaatattgttacatgatctatagatgatgtattgattttggcaggatcgaattccatatccgcgactaaacagtgaaaaaaatgtaaatactttttaaattttaaattagtaaaacttttttttattttttatgattccaaaaatactgaatacaaagtcctaaattataaatatggagatcatactaccacaacttattattatgtatacaaggccggtgtaatagatagatatatataattctattacaccggcagacaattaccgaccggtatttgtcgttaccaacataccgtataatatgtaatatacaattccataacccattgacagttgttatacatcaaaattgcaattcttttgattacgatgttataagaatgtagttaattgatgtatgatgttaatgtgtcctctttcctcttataacatcgtaatcaaaaacttttttataatatatacctaataatgtgtcttaatagttctcgtgattcgtcaaacaatcattcttataaaatataataaagcaacgtaaaaacacataaaaataagcgtaactaataagacaatggatatttacgacgataaaggtctacagactattaaactgtttaataatgaatttgattgtataaggaatgacatcagagaattatttaaacatgtaactgattccgatagtatacaacttccgatggaagacaattctgatattatagaaaatatcagaaaaatactatatagacgattaaaaaatgtagaatgtgttgacatcgataacacaataacttttatgaaatacgatccaaatgatgataataagcgtacgtgttctaattgggtacccttaactaataactatatggaatattgtctagtaatatatttggaaacaccgatatgtggaggcaaaataaaattataccaccctacaggaaatataaagtcggataaggatattatgtttgcaaagactctagactttaaatcaacgaaagtgttaactggacgtaaaacaattgccgttctagacatatccgtttcatataatagatcaatgactactattcactacaacgacgacgttgatatagatatacatactgataaaaatggaaaagagttatgttattgttatataacaatagatgatcattacttggttgatgtggaaactataggagttatagtcaatagatctggaaaatgtctgttagtaaataaccatctaggtataggtatcgttaaagataaacgtataagcgatagttttggagatgtatgtatggatacaatatttgacttttctgaagcacgagagttattttcattaactaatgatgataacaggaatatagcatgggacactgataaactagacgatgatacagatatatggactcccgtcacagaagatgattacaaatttctttctagactagtattgtatgcaaaatctcaatcggatactgtatttgactattatgttcttactggtgatacggaaccacccactgtattcattttcaaggtaactagattttactttaatatgccgaaataaaaaatttttgtataatatctagaggtagaggtattgtttagataaatacaaataacatagatacatcgcatacttagcatttttataaatatacataagacatacactttatacatttttgtaaaaatactcataaaaaaatttataaaaattatggcacaaccatatcttgtataggtagtttagttcgtcgagtgaacctataaacagataatagacaacacataataatgcctactaatacaagcataataccgggagatgggatatatgacgttgtagtgtttgggttttctgaacgttgatagtctactaatactacatgctgacatctaatgcctgtataaccatgagagcatctacaatacataccgtcaatatctctagcgtggatacagtcaccgtgtaaacaatatccatctccctctggaccgcataatctgatagctggaatatctgttgtagcgtttgtaatttctggcaatgtcgtttcgatagcgttaccactatcggcgaatgatctgattatcatagcagcgaacaacaacatcagataatttatcaacatttttgatggattctgtgtttatgctgtttctcagtgtgtgtttatgacaagattgggaattttatattattaattcagtaatataaactaataatatattgttaattgtgtaaataatataaaaataacaatacaatattgaatgtgttgctgttaaaaatgtatgtgttaatataatagaataaaataaatgagtatgatcattttagataacgattgattttatcattaccgcttcattcttatattctttgcttacggaacctatatttagaaacatctactaacaattttttatgcttgcattattaatggtatgtaatatgattgattgtgtacgcaataccaatttgttaagtatgaatacggggtacaaacataaattgaaatttaacattatttatttatgatatatatcgttatcgttaggtctataccatggatatctttaaagaactaatcttaaaacaccctgatgaaaatgttttgatttctccagtttccattttatctactttatctattctaaatcatggagcagctggttctacagctgaacaactatcaaaatatatagagaatatgaatgagaatacacccgatgacaataatgatgacatggaggtagatattccgtattgtgcgacactagctaccgcaaataaaatatacggtagcgatagtatcgagttccacgcctccttcctacaaaaaataaaagacgattttcaaactgtaaactttaataatgctaaccaaacaaaggaactaatcaacgaatgggttaagacaatgacaaatggtaaaattaattccttattgactagtccgctatccattaatactcgtatgacagttgttagcgccgtccattttaaagcaatgtggaaatatccattttctaaacatcttacatatacagacaagttttatatttctaagaatatagttaccagcgttgatatgatggtgggtaccgagaataacttgcaatatgtacatattaatgaattattcggaggattctctattatcgatattccatacgagggaaactctagtatggtaattatactaccggacgacatagaaggtatatataacatagaaaaaaatataacagatgaaaaatttaaaaaatggtgtggtatgttatctactaaaagtatagacttgtatatgccaaagtttaaagtggaaatgacagaaccgtataatctggtaccgattttagaaaatttaggacttactaatatattcggatattatgcagattttagcaagatgtgtaatgaaactatcactgtagaaaaatttctacatacgacgtttatagatgttaatgaggagtatacagaagcatcggccgttacaggagtatttacgattaacttttcgatggtatatcgtacgaaggtctacataaaccatccattcatgtacatgattaaagacaccacaggacgtatactttttatagggaaatactgctatccgcaataaatataaacaaatagacttttataaagagtcttcaacgataagtatatcgacatactacttatgctgcgaaagattctgaacgagaacgactatctcaccctcttggatcatatccgcactgctaaatactaaatctccactacactttttatcatcttatgaggaatgattgccttcgtgaaataggaataattagcaccagaatagctatggattattgtggtagagagtgcactattctatgtcgtctactggatgaagatgtgacgtacaaaaaaataaaactagaaattgaaacgtgtcacaacttatcaaaacatatagatagacgaggaaacaatgcgctacattgttacgtctccaataaatgcgatacagacattaagattgttctctcgcggagtcgagagactttgtagaaacaacgaaggattaactccgctaggagtatacagtaagcatagatacgtaaaatctcagattgtgcatctactgatatccagctattcaaattcctctaacgaactcaagtcgaatataaatgatttcgatctgtattcggataatatcgacttacgtctgctaaaatacctaattgtggataaacggatacgtccgtccaagaatacgaattatgcaatcaatggtctcggattggtggatatatacgtaacgacgcctaatccgagaccagaagtattgctatggcttcttaaatcagaatgttacagcaccggttacgtatttcgtacctgtatgtacgacagtgatatgtgtaagaactctcttcattactatatatcgtctcatagagaatctcaatctctatccaaggatgtaattaaatgtttgatcgataacaatgtttccatccatggcagagacgaaggaggatctttacccatccaatactactggtctttctcaaccatagatatagagattgttaaattattattaataaaggatgtggacacgtgtagagtatacgacgtcagccctatattagaggcgtattatctaaacaagcgatttagagtaaccccatataatgtagacatggaaatcgttaatcttcttattgagagacgtcatactcttgtcgacgtaatgcgtagtattacttcgtacgattccagagaatataaccactacatcatcgataacattctaaagagatttagacaacaggatgaatccatcgtacaagccatactgataaactacttacattacggcgatatggtcgttcgatgcatgttagataacggacaacaactatcctctacacgactactttgttaataataatctcgtcgatgtaaacgtcgtaaggtttatcgtggaaaatatggacacgcggctgtaaatcacgtatcgaacaatggccgtctatgtatgtacggtctgatattatcgagatttaataattgcgggtatcactgttatgaaaccatactgatagatgtatttgatatactaagcaagtacatggatgatatagatatgatcgataactctactatattacgcggtcgatgtcaataatatacaatttgcaaagcggttattggaatatggagcgagtatcacgctcgataatcaatacggccatccagaaaagcagttacagaagagaaaacaaaacgaaatcgttgttctacaagatgtctctccctacgacgattactacgtaaaaaagatactagcctactgcctattaagggacgagtcattcgcggaactacatagtaaattctgtttaaacgaggactataaaagtgtatttatgaaaaatatatcattcgataagatagattccatcatcgtgacataagtcgcctcaaagagattcgaatctccgacaccgacctgtatacggtatcacagctatcttaaagccatacattcagacagtcacatttcatttcccatgtacgacgatctcatagaacagtgccatctatcgatggagcgtaaaagtaaactcgtcgacaaagcactcaataaattagagtctaccatcggtcaatctagactatcgtatttgcctccggaaattatgcgcaatatcatctaaacagtatgttgtacggaaagaaccattacaaatattatccatgatagaaagaaaatatctatatgattggagaagtaggaaacaggaacaagacaacgattactacattattaaatcatgaagtccgtattatactcgtatatattgtttctctcatgtataataataaacggaagagatatagcaccgcatgcaccatccgatggaaagtgtaaagacaacgaatacaaacgccataatttgtgtccgggaacatacgcttccagattatgcgatagcaagactaacacacgatgtacgccgtgtggttcgggtaccttcacatctcgcaataatcatttacccgcttgtctaagttgtaacggaagacgcgatcgtgtaacacgactcacaatagaatctgtgaatgctctcccggatattattgtcttctcaaaggatcatccggatgcaaggcatgtgtttcccaaacaaaatgtggaataggatacggagtatccggagacgtcatctgttctccgtgtggtctcggaacatattctcacaccgtctcttccgcagataaatgcgaacccgtacccagaaatacgtttaactatatcgatgtggaaattaacctgtatccagttaacgacacgtcgtgtactcggacgaccactaccggtctcagcgaatccatctcaacgtcggaactaactattactatgaatcataaagactgtaatcccgtatttcgtgatggatacttctccgttcttaataaggtagcgacttcaggtttctttacaggagaaaggtgtgcactctgaatttcgagattaaatgcaataacaaagattcttcctccaaacagttaacgaaagcaaagaatgatactatcatgccgcattcggagacagtaactctagtgggcgacatctatatactatatagtaataccaatactcaagactacgaaactgatacaatctcttatcatgtgggtaatgttctcgatgtcgatagccatatgcccggtagttgcgatatacataaactgatcactaattccaaacccacccactttttatagtaagtttttcacccataaataataaatacaataattaatttctcgtaaaagtagaaaatatattctaatttattgcacggtaaggaagtagaatcataaagaacagtactcaatcaatagcaattatgaaacaatatatcgtcctggcatgcatgtgcctggcggcagctgctatgcctgccagtcttcagcaatcatcctcatcctcctcctcgtgtacggaagaagaaaacaaacatcatatgggaatcgatgttattatcaaagtcacaaagcaagaccaaacaccgaccaatgataagatttgccaatccgtaacggaaattacagagtccgagtcagatccagatcccgaggtggaatcagaagatgattccacatcagtcgaggatgtagatcctcctaccacttattactccatcatcggtggaggtctgagaatgaactttggattcaccaaatgtcctcagattaaatccatctcagaatccgctgatggaaacacagtgaatgctagattgtccagcgtgtccccaggacaaggtaaggactctcccgcgatcactcatgaagaagctcttgctatgatcaaagactgtgaagtgtctatcgacatcagatgtagcgaagaagagaaagacagcgacatcaagacccatccagtactcgggtctaacatctctcataagaaagtgagttacgaagatatcatcggttcaacgatcgtcgatacaaaatgcgtcaagaatctagagtttagcgttcgtatcggagacatgtgcaaggaatcatctgaacttgaggtcaaggatggattcaagtatgtcgacggatcggcatctgaaggtgcaaccgatgatacttcactcatcgattcaacaaaactcaaagcgtgtgtctgaatcgataactctattcatctgaaattggatgagtagggttaatcgaacgattcaggcacaccacgaattaaaaaagtgtaccggacactatattccggtttgcaaaacaaaaatgttcttaactacattcacaaaaagttacctctcgcgacttcttctttttctgtctcaatagtgtgatacgattatgacactattcctattcctattcctatttcctttcagagtatcacaaaaatattaaacctctttctgatggtctcataaaaaaagttttacaaaaatatttttattctctttctctctttgatggtctcataaaaaaagttttacaaaaatatttttattctctttctctctttgatggtctcataaaaaaagttttacaaaaatatttttattctctttctctctttgatggtctcataaaaaaagttttacaaaaatatttttattctctttctctctttgatggtctcataaaaaaagttttacaaaaatatttttattctctttctctctttgatggtctcataaaaaaagttttacaaaaatatttttattctctttctctctttgatggtctcataaaaaaagttttacaaaaatatttttattctctttctctctttgatggtctcataaaaaaagttttacaaaaatatttttattctctttctctctttgatggtctcataaaaaaagttttacaaaaatatttttattctctttctctctttgatggtctcataaaaaaagttttacaaaaatatttttattctctttctctctttgatggtctcataaaaaaagttttacaaaaatatttttattctctttctctctttgatggtctcataaaaaaagttttacaaaaatatttttattctctttctctctttgatggtctcataaaaaagttttacaaaaatatttttattctctttctctctttgatggtctcataaaaaagttttacaaaaatatttttattctctttctctctttgatggtctcataaaaaaagttttacaaaaatatttttattctctttctctctttgatggtctcataa

SEQ ID NO: 20 - DNA, 190167 bp, Artificial Sequence
  LIVP parental genome
ttatgagaccatcaaagagagaaagagaataaaaatatttttgtaaaactttttttatgagaccatcaaagagagaaagagaataaaaatatttttgtaaaacttttttatgagaccatcaaagagagaaagagaataaaaatatttttgtaaaacttttttatgagaccatcaaagagagaaagagaataaaaatatttttgtaaaactttttttatgagaccatcaaagagagaaagagaataaaaatatttttgtaaaactttttttatgagaccatcaaagagagaaagagaataaaaatatttttgtaaaactttttttatgagaccatcaaagagagaaagagaataaaaatatttttgtaaaactttttttatgagaccatcaaagagagaaagagaataaaaatatttttgtaaaactttttttatgagaccatcaaagagagaaagagaataaaaatatttttgtaaaactttttttatgagaccatcaaagagagaaagagaataaaaatatttttgtaaaactttttttatgagaccatcaaagagagaaagagaataaaaatatttttgtaaaactttttttatgagaccatcaaagagagaaagagaataaaaatatttttgtaaaactttttttatgagaccatcaaagagagaaagagaataaaaatatttttgtaaaactttttttatgagaccatcaaagagagaaagagaataaaaatatttttgtaaaactttttttatgagaccatcaaagagagaaagagaataaaaatatttttgtaaaactttttttatgagaccatcagaaagaggtttaatatttttgtgatactctgaaaggaaataggaataggaataggaatagtgtcataatcgtatcacactattgagacagaaaaagaagaagtcgcgagaggtaactttttgtgaatgtagttaagaacatttttgttttgcaaaccggaatatagtgtccggtacacttttttaattcgtggtgtgcctgaatcgttcgattaaccctactcatccaatttcagatgaatagagttatcgattcagacacacgctttgagttttgttgaatcgatgagtgaagtatcatcggttgcaccttcagatgccgatccgtcgacatacttgaatccatccttgacctcaagttcagatgattccttgcacatgtctccgatacgaacgctaaactctagattcttgacgcattttgtatcgacgatcgttgaaccgatgatatcttcgtaactcactttcttatgagagatgttagacccgagtactggatgggtcttgatgtcgctgtctttctcttcttcgctacatctgatgtcgatagacacttcacagtctttgatcatagcaagagcttcttcatgagtgatcgcgggagagtccttaccttgtcctggggacacgctggacaatctagcattcactgtgtttccatcagcggattctgagatggatttaatctgaggacatttggtgaatccaaagttcattctcagacctccaccgatgatggagtaataagtggtaggaggatctacatcctcgactgatgtggaatcatcttctgattccacctcgggatctggatctgactcggactctgtaatttccgttacggattggcaaatcttatcattggtcggtgtttggtcttgctttgtgactttgataataacatcgattcccatatgatgtttgttttcttcttccgtacacgaggaggaggatgaggatgattgctgaagactggcaggcatagcagctgccgccaggcacatgcatgccaggacgatatattgtttcataattgctattgattgagtactgttctttatgattctacttccttaccgtgcaataaattagaatatattttctacttttacgagaaattaattattgtatttattatttatgggtgaaaaacttactataaaaagtgggtgggtttggaattagtgatcagtttatgtatatcgcaactaccgggcatatggctatcgacatcgagaacattacccacatgataagagattgtatcagtttcgtagtcttgagtattggtattactatatagtatatagatgtcgcccactagagttactgtctccgaatgcggcatgatagtatcattctttgctttcgttaactgtttggaggaagaatctttgttattgcatttaatctcgaaattcagagtgcacacctttctcctgtaaagaaacctgaagtcgctaccttattaagaacggagaagtatccatcacgaaatacgggattacagtctttatgattcatagtaatagttagttccgacgttgagatggattcgctgagaccggtagtggtcgtccgagtacacgacgtgtcgttaactggatacaggttaatttccacatcgatatagttaaacgtatttctgggtacgggttcgcatttatctgcggaagagacggtgtgagaatatgttccgagaccacacggagaacagatgacgtctccggatactccgtatcctattccacattttgtttgggaaacacatgccttgcatccggatgatcctttgagaagacaataatatccgggagagcattcacagattctattgtgagtcgtgttacacgatcgcgtcttccgttacaacttagacaagcgggtaaatgattattgcgagatgtgaaggtacccgaaccacacggcgtacatcgtgtgttagtcttgctatcgcataatctggaagcgtatgttcccggacacaaattatggcgtttgtattcgttgtctttacactttccatcggatggtgcatgcggtgctatatctcttccgtttattattatacatgagagaaacaatatatacgagtataatacggacttcatgatttaataatgtagtaatcgttgtcttgttcctgtttcctacttctccaatcatatagatattttctttctatcatggataatatttgtaatggttctttccgtacaacatactgtttagatgatattgcgcataatttccggaggcaaatacgatagtctagattgaccgatggtagactctaatttattgagtgctttgtcgacgagtttacttttacgctccatcgatagatggcactgttctatgagatcgtcgtacatgggaaatgaaatgtgactgtctgaatgtatggctttaagatagctgtgataccgtatacaggtcggtgtcggagattcgaatctctttgaggcgacttatgtcacgatgatggaatctatcttatcgaatgatatatttttcataaatacacttttatagtcctcgtttaaacagaatttactatgtagttccgcgaatgactcgtcccttaataggcagtaggctagtatcttttttacgtagtaatcgtcgtagggagagacatcttgtagaacaacgatttcgttttgttttctcttctgtaactgcttttctggatggccgtattgattatcgagcgtgatactcgctccatattccaataaccgctttgcaaattgtatattattgacatcgaccgcgtaatatagtagagttatcgatcatatctatatcatccatgtacttgcttagtatatcaaatacatctatcagtatggtttcataacagtgatacccgcaattattaaatctcgataatatcagaccgtacatacatagacggccattgttcgatacgtgatttacagccgcgtgtccatattttccacgataaaccttacgacgtttacatcgacgagattattattaacaaagtagtcgtgtagaggatagttgttgtccgttatctaacatgcatcgaacgaccatatcgccgtaatgtaagtagtttatcagtatggcttgtacgatggattcatcctgttgtctaaatctctttagaatgttatcgatgatgtagtggttatattctctggaatcgtacgaagtaatactacgcattacgtcgacaagagtatgacgtctctcaataagaagattaacgatttccatgtctacattatatggggttactctaaatcgcttgtttagataatacgcctctaatatagggctgacgtcgtatactctacacgtgtccacatcctttattaataataatttaacaatctctatatctatggttgagaaagaccagtagtattggatgggtaaagatcctccttcgtctctgccatggatggaaacattgttatcgatcaaacatttaattacatccttggatagagattgagattctctatgagacgatatatagtaatgaagagagttcttacacatatcactgtcgtacatacaggtacgaaatacgtaaccggtgctgtaacattctgatttaagaagccatagcaatacttctggtctcggattaggcgtcgttacgtatatatccaccaatccgagaccattgattgcataattcgtattcttggacggacgtatccgtttatccacaattaggtattttagcagacgtaagtcgatattatccgaatacagatcgaaatcatttatattcgacttgagttcgttagaggaatttgaatagctggatatcagtagatgcacaatctgagattttacgtatctatgcttactgtatactcctagcggagttaatccttcgttgtttctacaaagtctctcgactccgcgagagaacaatcttaatgtctgtatcgcatttattggagacgtaacaatgtagcgcattgtttcctcgtctatctatatgttttgataagttgtgacacgtttcaatttctagttttatttttttgtacgtcacatcttcatccagtagacgacatagaatagtgcactctctaccacaataatccatagctattctggtgctaattattcctatttcacgaaggcaatcattcctcataagatgataaaaagtgtagtggagatttagtatttagcagtgcggatatgatccaagagggtgagatagtcgttctcgttcagaatctttcgcagcataagtagtatgtcgatatacttatcgttgaagactctttataaaagtctatttgtttatatttattgcggatagcagtatttccctataaaaagtatacgtcctgtggtgtctttaatcatgtacatgaatggatggtttatgtagaccttcgtacgatataccatcgaaaagttaatcgtaaatactcctgtaacggccgatgcttctgtatactcctcattaacatctataaacgtcgtatgtagaaatttttctacagtgatagtttcattacacatcttgctaaaatctgcataatatccgaatatattagtaagtcctaaattttctaaaatcggtaccagattatacggttctgtcatttccactttaaactttggcatatacaagtctatacttttagtagataacataccacaccattttttaaatttttcatctgttatatttttttctatgttatatataccttctatgtcgtccggtagtataattaccatactagagtttccctcgtatggaatatcgataatagagaatcctccgaataattcattaatatgtacatattgcaagttattctcggtacccaccatcatatcaacgctggtaactatattcttagaaatataaaacttgtctgtatatgtaagatgtttagaaaatggatatttccacattgctttaaaatggacggcgctaacaactgtcatacgagtattaatggatagcggactagtcaataaggaattaattttaccatttgtcattgtcttaacccattcgttgattagttcctttgtttggttagcattattaaagtttacagtttgaaaatcgtcttttattttttgtaggaaggaggcgtggaactcgatactatcgctaccgtatattttatttgcggtagctagtgtcgcacaatacggaatatctacctccatgtcatcattattgtcatcgggtgtattctcattcatattctctatatattttgatagttgttcagctgtagaaccagctgctccatgatttagaatagataaagtagataaaatggaaactggagaaatcaaaacattttcatcagggtgttttaagattagttctttaaagatatccatggtatagacctaacgataacgatatatatcataaataaataatgttaaatttcaatttatgtttgtaccccgtattcatacttaacaaattggtattgcgtacacaatcaatcatattacataccattaataatgcaagcataaaaaattgttagtagatgtttctaaatataggttccgtaagcaaagaatataagaatgaagcggtaatgataaaatcaatcgttatctaaaatgatcatactcatttattttattctattatattaacacatacatttttaacagcaacacattcaatattgtattgttatttttatattatttacacaattaacaatatattattagtttatattactgaattaataatataaaattcccaatcttgtcataaacacacactgagaaacagcataaacacagaatccatcaaaaatgttgataaattatctgatgttgttgttcgctgctatgataatcagatcattcgccgatagtggtaacgctatcgaaacgacattgccagaaattacaaacgctacaacagatattccagctatcagattatgcggtccagagggagatggatattgtttacacggtgactgtatccacgctagagatattgacggtatgtattgtagatgctctcatggttatacaggcattagatgtcagcatgtagtattagtagactatcaacgttcagaaaacccaaacactacaacgtcatatatcccatctcccggtattatgcttgtattagtaggcattattatgtgttgtctattatctgtttataggttcactcgacgaactaaactacctatacaagatatggttgtgccataatttttataaatttttttatgagtatttttacaaaaatgtataaagtgtatgtcttatgtatatttataaaaatgctaagtatgcgatgtatctatgttatttgtatttatctaaacaatacctctacctctagatattatacaaaaattttttatttcggcatattaaagtaaaatctagttaccttgaaaatgaatacagtgggtggttccgtatcaccagtaagaacataatagtcaaatacagtatccgattgagattttgcatacaatactagtctagaaagaaatttgtaatcatcttctgtgacgggagtccatatatctgtatcatcgtctagtttatcagtgtcccatgctatattcctgttatcatcattagttaatgaaaataactctcgtgcttcagaaaagtcaaatattgtatccatacatacatctccaaaactatcgcttatacgtttatctttaacgatacctatacctagatggttatttactaacagacattttccagatctattgactataactcctatagtttccacatcaaccaagtaatgatcatctattgttatataacaataacataactcttttccatttttatcagtatgtatatctatatcaacgtcgtcgttgtagtgaatagtagtcattgatctattatatgaaacggatatgtctagaacggcaattgttttacgtccagttaacactttcgttgatttaaagtctagagtctttgcaaacataatatccttatccgactttatatttcctgtagggtggtataattttattttgcctccacatatcggtgtttccaaatatattactagacaatattccatatagttattagttaagggtacccaattagaacacgtacgcttattatcatcatttggatcgtatttcataaaagttattgtgttatcgatgtcaacacattctacattttttaatcgtctatatagtatttttctgatattttctataatatcagaattgtcttccatcggaagttgtatactatcggaatcagttacatgtttaaataattctctgatgtcattccttatacaatcaaattcattattaaacagtttaatagtctgtagacctttatcgtcgtaaatatccattgtcttattagttacgcttatttttatgtgtttttacgttgctttattatattttataagaatgattgtttgacgaatcacgagaactattaagacacattattaggtatatattataaaaaagtttttgattacgatgttataagaggaaagaggacacattaacatcatacatcaattaactacattcttataacatcgtaatcaaaagaattgcaattttgatgtataacaactgtcaatgggttatggaattgtatattacatattatacggtatgttggtaacgacaaataccggtcggtaattgtctgccggtgtaatagaattatatatatctatctattacaccggccttgtatacataataataagttgtggtagtatgatctccatatttataatttaggactttgtattcagtatttttggaatcataaaaaataaaaaaaagttttactaatttaaaatttaaaaagtatttacatttttttcactgtttagtcgcggatatggaattcgatcctgccaaaatcaatacatcatctatagatcatgtaacaatattacaatacatagatgaaccaaatgatataagactaacagtatgcattatccgaaatattatatcaatatcacaaaaataaatacacatttggctaatcaatttcgggcttggaaaaaacgtatcgccggaagggactatatgactaacttatctagagatacaggaatacaacaatcaaaacttactgaaactatacgtaactgtcaaaaaaatagaaacatatatggtctatatatacactacaatttagttattaattggataaccgatgtgattatcaatcaatattaagagggttggtaaattggtacatagctaataatacctatactccaaatacacccaataatacaacaaccatttctgagttggatatcatcaaaatactaaataaatacgaggacgtgtatagagtaagtaaagaaaaagaatgtggaatttgctatgaagttgtttactcaaaacgatagatactttggtttattggattcgtgtactcatatattttgcataacatgcatcaatatatggcatagaacacgaagagaaaccggtgcgtcggataattgtcctatatgccgtacccgttttagaaacataacaatgagcaagttctataagctagttaactaataaataaaaagtttaatttgttgacgacgtatgtcgttattttttctcgtataaaagattaatttgattctaatataatctttagtattggataaatatcaattcaaattaattccattagattatatcataaataaaaatagtagcacacaactacttcagcaaacattctttttataaatgccatctagcgtagcgaggacacaagtgaacctataattatcaaatttattagtatcagtcacatgaaggactttacgtagagtgacgattccactatctgtggtacgaacggtttcatcttctttgatgccatcacccagatgttctataaacttggtatcctcgtccgatttcatatcctttgccaaccaatacatatagctaaactcaggcatatgttccacacatcctgaacaatgaaattctccagaagatgttacaatgtctagatttggacatttggtttcaaccgcgttaacatatgagtgaacacacccatacatgaaagcgatgagaaataggattctcatcttgccaaaatatcactagaaaaaatttatttatcagttttaaaggtataaaaaatacttattgttgctcgaatattttgtatttgatggtatacggaagattagaaatgtaggtattatcatcaactgattctatggttttatgtattctatcatgtttcactattgcgttggaaataatatcatatgcttccacatatattttattttgttttaactcataatactcacgtaattctggattattggcatatctatgaataattttagctccatgatcagtaaatattaatgagaacatagtattaccacctaccattatttttttcatctcattcaattcttaattgcaaagatctatataatcattatagcgttgacttatggactctggaatcttagacgatgtacagtcatctataatcatggcatatttaatacattgttttatagcatagtcgttatctacgatgttagatatttctctcaatgaatcaatcacacaatctaatgtaggtttatgacataatagcattttcagcagttcaatgtttttagattcgttgatggcaatggctatacatgtatatccgttatttgatctaatgttgacatctgaaccggattctagcagtaaagatactagagattgtttattatatctaacagccttgtgaagaagtgtttctcctcgtttgtcaatcatgttaatgtctttaagataaggtaggcaaatgtttatagtactaagaattgggcaagcataagacatgtcacaaagacccttttttgtatgtataagtgtaaaaattataacatccatagttggatttacataggtgtccaatcgggatctctccatcatcgagataattgatggcatctcccttccttttttagtagatatttcatcgtgtaagaatcaatattaatatttctaaagtatccgtgtatagcctctttatttaccacagctccatattccactagagggatatcgccgaatgtcatatactcaattagtatatgttggaggacatccgagttcattgttttcaatatcaaagagatggtttccttatcatttctccatagtggtacaatactacacattattccgtgcggctttccattttccaaaaacaatttgaccaaatctaaatctacatctttattgtatctataatcactatttagataatcagccataattcctcgagtgcaacatgttagatcgtctatatatgaataagcagtgttatctattcctttcattaacaatttaacgatgtctatatctatatgagatgacttaatataatattgaagagctgtacaatagtttttatctataaaagacggcttgattccgtgattaattagacatttaacaacttccggacgcacatatgctctcgtatccgactctgaatacagatgagagatgatatacagatgcaatacggtaccgcaatttcgtagttgataatcatcatacgcgtatcagtactcgtcctcataaagaacactgcagccattttctatgaacaaatcaataattttagaaacaggatcattgtcattacataattttctataactgaacgatggttttcacatttaacactcaagtcaaatccatgttctaccaacacctttatcaagtcaacgtctacatttttggatttcatatagctgaatatattaaagttatttatgttgctaaatccagtggcttctagtagagccatcgctatatccttattaactttaacatgtctactatttgtgtattcttctaatggggtaagctgtctccaatttttgcgtaatggattagtgccactgtctagtagtagtttgacgacctcgacattattacaatgctcattaaaaaggtatgcgtgtaaagcattattcttgaattggttcctggtatcattaggatctctgtctttcaacatctgtttaagttcatcaagagccacctcctcattttccaaatagtcaaacattttgactgaatgagctactgtgaactctatacacccacacaactaatgtcattaaatatcatgtcaaaaacttgtacaattattaataaaaataatttagtgtttaaattttaccagttccagattttacacctccgttaatacctccattaaccccactggacgatcctcctccccacattccaccgccaccagatgtataagttttagatcctttattactaccatcatgtccatggataaagacactccacatgccgccactaccccctttagaagacatattaataagacttaaggacaagtttaacaataaaattaatcacgagtaccctactaccaacctacactattatatgattatagtttctatttttacagtaccttgactaaagtttctagtcacaagagcaatactaccaacctacactattatatgattatagtttctatttttataggaacgcgtacgagaaaatcaaatgtctaatttctaacggtagtgttgataaacgattgttatccgcggatacctcctctatcatgtcgtctattttcttactttgttctattaacttattagcattatatattatttgattataaaacttatattgcttattagcccaatctgtaaatatcggattattaacatatcgtttctttgtaggtttatttaacatgtacatcactgtaagcatgtccttaccatttattttaatttgacgcatatccgcaatttctttttcgcagtcggttataaattctatatatgatggatacatgctacatgtgtacttataatcgactaatatgaagtacttgatacatattttcagtaacgatttattattaccacctatgaataagtacctgtgatcgtctaggtaatcaactgttttcttaatacattcgatggttggtaatttactcagaataatttccaatatcttaatatataattctgctatttctgggatatatttatctgccagtataacacaaatagtaatacatgtaaacccatattttgttattatattaatgtctgcgccattatctattaaccattctactaggctgacactatgcgactcaatacaatgataaagtatactacatccatgtttatctattttgtttatatcatcaatatacggcttacaaagttttagtatcgataacacatccaactcacgcatagagaaggtagggaataatggcataatatttattaggttatcatcattgtcattatctacaactaagtttccattttttaaaatatactcgacaactttaggatctctattgccaaatttttgaaaatatttatttatatgcttaaatctatataatgtagctccttcatcaatcatacatttaataacattgatgtatactgtatgataagatacatattctaacaatagatcttgtatagaatctgtatatcttttaagaattgtggatattaggatattattacataaactattacacaattctaaaatataaaacgtatcacggtcgaataatagttgatcaactatataattatcgattttgtgatttttcttcctaaactgtttacgtaaatagttagatagaatattcattagttcatgaccactatagttactatcgaataacgcgtcaaatatttcccgtttaatatcgcatttgtcaagataataatagagtgtggtatgttcacgataagtataataacgcatctctttttcgtgtgaaattaaatagtttattacgtccaaagatgtagcataaccatcttgtgacctagtaataatataataatagagaactgttttacccattctatcatcataatcagtggtgtagtcgtaatcgtaatcgtctaattcatcatcccaattataatattcaccagcacgtctaatctgttctattttgatcttgtatccatactgtatgttgctacatgtaggtattcctttatccaataatagtttaaacacatctacattgggatttgatgttgtagcgtatttttctacaatattaataccatttttgatactatttatttctatacctttcgaaattagtaatttcaataagtctatattgatgttatcagaacatagatattcgaatatatcaaaatcattgatatttttatagtcgactgacgacaataacaaaatcacaacatcgtttttgatattattatttttcttggtaacgtatgcctttaatggagtttcaccatcatactcatataatggatttgcaccactttctatcaatgattgtgcactgctggcatcgatgttaaatgttttacaactatcatagagtatcttatcgttaaccatgattggttgttgatgctatcgcattttttggtttctttcatttcagttatgtatggatttagcacgtttgggaagcatgagctcatatgatttcagtactgtagtgtcagtactattagtttcaataagatcaatctctagatctatagaatcaaaacacgataggtcagaagataatgaatatctgtaggcttcttgttgtactgtaacttctggttttgttagatggttgcatcgtgctttaacgtcaatggtacaaattttatcctcgctttgtgtatcatattcgtccctactataaaattgtatattcagattatcatgcgatgtgtatacgctaacggtatcaataaacggagcacaccatttagtcataaccgtaatccaaaaatttttaaagtatatcttaacgaaagaagttgtgtcattgtctacggtgtatggtactagatcctcataagtgtatatatctagagtaatgtttaatttattaaatggttgataatatggatcctcgtgacaatttccgaagatggaaataagacataaacacgcaataaatctaattgcggacatggttactccttaaaaaaatacgaataatcaccttggctatttagtaagtgtcatttaacactatactcatattaatccatggactcataatctctatacgggattaacggatgttctatatacggggatgagtagttctcttctttaactttatactttttactaatcatatttagactgatgtatgggtaatagtgtttgaagagctcgttctcatcatcagaataaatcaatatctctgtttttttgttatacagatgtattacagcctcatatattacgtaatagaacgtgtcatctaccttattaactttcaccgcatagttgtttgcaaatacggttaatcctttgacctcgtcgatttccgaccaatctgggcgtataatgaatctaaactttaattgcttgtaatcattcgaaataatttttagtttgcatccgtagttatcccctttatgtaactgtaaatttctcaacgcgatatctccattaataatgatgtcgaattcgtgctgtatacccatactgaatggatgaacgaataccgacggcgttaatagtaatttactttttcatctttacatattgggtactagttttactatcataagtttataaattccacaagctactatggaataagccaaccatcttagtataccacacatgtcttaaagtttattaattaattacatgttgttttatatatatcgctacgaatttaaagagaaattagtttaggaagaaaaattatctatctacatcatcacgtctctgtattctacgatagagtgctactttaagatgcgacagatccgtgtcatcaaatatatactccattaaaatgattattccggcagcgaacttgatattggatatatcacaacctttgttaatatctacgacaatagacagcagtcccatggttccataaacagtgagtttatctttctttgaagagatattttgtagagatcttataaaactgtcgaatgacatcgcatttatatctttagctaaatcgtatatgttaccatcgtaatatctaaccgcgtctatcttaaacgtttccatcgctttaaagacgtttccgatagatggtctcatttcatcagtcatactgagccaacaaatataatcgtgtataacatctttgatagaatcagactctaaagaaaacgaatcggctttattatacgcattcatgataaacttaatgaaaaatgtttttcgttgtttaagttggatgaatagtatgtcttaataattgttattatttcattaattaatatttagtaacgagtacactctataaaaacgagaatgacataactaatcataactagttatcaaagtgtctaggacgcgtaattttcatatggtatagatcctgtaagcattgtctgtattctggagctattttctctatcgcattagtgagttcagaatatgttataaatttaaatcgaataacgaacataactttagtaaagtcgtctatattaactcttttattttctagccatcgtaataccatgtttaagatagtatattctctagttactacgatctcatcgttgtctagaatatcacatactgaatctacatccaattttagaaattggtctgtgttacatatctcttctatattattgttgatgtattgtcgtagaaaactattacgtagaccattttctttataaaacgaatatatagtactccaattatctttaccgatatatttgcacacataatccattctctcaatcactacatctttaagattttcgttgttaagatatttggctaaactatataattctattagatcatcaacagaatcagtatatatttttctagatccaaagacgaactctttggcgtcctctataatattcccagaaaagatattttcgtgttttagtttatcgagatctgatctgttcatatacgccatgattgtacggtacgttatgataaccgcataaaataaaaatccattttcatttttaaccaatactattcataattgagattgatgtaatactttgttactttgaacgtaaagacagtacacggatccgtatctccaacaagcacgtagtaatcaaatttggtgttgttaaacttcgcaatattcatcaatttagatagaaacttatactcatcatctgttttaggaatccatgtattattaccactttccaacttatcattatcccaggctatgtttcgtccatcatcgttgcgcagagtgaataattcttttgtattcggtagttcaaatatatgatccatgcatagatcggcaaagctattgtagatgtgatttttcctaaatctaatataaaactcgtttactagcaaacactttcctgatttatcgaccaagacacatatggtttctaaatctatcaagtggtggggatccatagttatgacgcagtaacatatattattacattcttgactgtcgctaatatctaaatatttattgttatcgtattggattctgcatatagatggcttgtatgtcaaagatatagaacacataaccaatttatagtcgcgctttacattctcgaatctaaagttaagagatttagaaaacattatatcctcggatgatgttatcactgtttctggagtaggatatattaaagtctttacagatttcgtccgattcaaataaatcactaaataatatcccacattatcatctgttagagtagtatcattaaatctattatattttatgaaagatatatcactgctcacctctatatttcgtacatttttaaactgtttgtataatatctctctgatacaatcagatatatctattgtgtcggtagacgataccgttacatttgaattaatggtgttccattttacaacttttaacaagttgaccaattcatttctaatagtatcaaactctccatgattaaatattttaatagtatccattttatatcactacggacacaaagtagctgacataaaccattgtataatttttatgttttatgtttattagcgtacacattttggaagttccggcttccatgtatttcctggagagcaagtagatgatgaggaaccagatagtttatatccgtacttgcacttaaagtctacattgtcgttgtatgagtatgatcttttaaacccgctagacaagtatccgtttgatattgtaggatgtggacatttaacaatctgacacgtgggtggatcggaccattctcctcctgaacacaggacactagagttaccaatcaacgaatatccactattgcaactataagttacaacgctcccatcggtataaaaatcctcgtatccgttatgtcttccgttggatatagatggaggggattggcatttaacagattcacaaataggtgcctcgggattccataccatagatccagtagatcctaattcacaatacgatttagattcaccgatcaactgatatccgctattacaagagtacgttatactagagccaaagtctactccaccaatatcaagttggccattatcgatatctcgaggcgatgggcatctccgtttaatacattgattaaagagtgtccatccagtacctgtacatttagcatatataggtcccattttttgctttctgtatccaggtagacatagatattctatagtgtctcctatgttgtaattagcattagcatcagtctccacactattcttaaatttcatattaatgggtcgtgacggaatagtacagcatgatagaacgcatcctattcccaacaatgtcaggaacgtcacgctctccaccttcatatttatttatccgtaaaaatgttatcctggacatcgtacaaataataaaaagcccatatatgttcgctattgtagaaattgtttttcacagttgctcaaaaacgatggcagtgacttatgagttacgttacactttggagtctcatctttagtaaacatatcataatattcgatattacgagttgacatatcgaacaaattccaagtatttgattttggataatattcgtattttgcatctgctataattaagatataatcaccgcaagaacacacgaacatctttcctacatggttaaagtacatgtacaattctatccatttgtcttccttaactatatatttgtatagataattacgagtctcgtgagtaattccagtaattacatagatgtcgccgtcgtactctacagcataaactatactatgatgtctaggcatgggagacttttttatccaacgatttttagtgaaacattccacatcgtttaatactacatatttctcatacgtggtataaactccacccattacatatatatcatcgtttacgaataccgacgcgcctgaatatctaggagtaattaagtttggaagtcttatccatttcgaagtgccgtgtttcaaatattctgccacacccgttgaaatagaaaattctaatcctcctattacatataactttccatcgttaacacaagtactaacttctgattttaacgacgacatattagtaaccgttttccattttttcgttttaagatctacccgcgatacggaataaacatgtctattgttaatcatgccgccaataatgtatagacaattatgtaaaacatttgcattatagaattgtctatctgtattaccgactatcgtccaatattctgttctaggagagtaatgggttattgtggatatataatcagagtttttaatgactactatattatgttttataccatttcgtgtcactggctttgtagatttggatatagttaatcccaacaatgatatagcattgcgcatagtattagtcataaacttgggatgtaaaatgttgatgatatctacatcgtttggatttttatgtatccactttaataatatcatagctgtaacatcctcatgatttacgttaacgtcttcgtgggataagatagttgtcagttcatcctttgataattttccaaattctggatcggatgtcaccgcagtaatattgttgattatttctgacatcgacgcattatatagttttttaattccatatcttttagaaaagttaaacatccttatacaatttgtgaaattaatattatgaatcatagtttttacacatagatctactacaggcggaacatcaattattatggcagcaactagtatcatttctacattgtttatggtgatgtttatcttcttccagcgcatatagtctaatagcgattcaaacgcgtgatagtttataccattcaatataatcgcttcatcctttagatggtgatcctgaatgcgtttaaaaaaattatacggagacgccgtaataatttccttattcacttgtataatttccccattgatagaaaatattacgctttccattcttaaagtactataagtaattatagtataatgtaaacgtttatatattcaatatttttataaaaatcattttgacattaattcctttttaaatttccgtctatcatctatagaaacgtattctatgaatttataaaatgcttttacgtgtcctatcgtaggcgatagaaccgctaaaaagcctatcgaatttctacaaaagaatctgttatatggtatagggagagtataaaacattaaatgtccgtacttattaaagtattcagtagccaatcctaactctttcgaatacttattaatggctcttgttctgtacgaatctatttttttgaacaacggacctagtggtatatcttgttctatgtatctaaaataatgtctgactagatccgttagtttaatatccgcagtcatcttgtctagaatggcaaatctaactgcgggtttaggctttagtttagtttctatatctacatctatgtctttatctaacaccaaaaatataatagctaatattttattacaatcatccggatattcttctacgatctcactaactaatgtttctttggttatactagtatagtcactatcggacaaataaagaaaatcagatgatcgatgaataatacatttaaattcatcatctgtaagatttttgagatgtctcattagaatattattagggttagtactcattatcattcggcagctattacttattttattatttttcaccatatagatcaatcattagatcatcaaaatatgtttcaatcatcctaaagagtatggtgaatgactcttcccatctaatttctgaacgttcaccaatgtctctagccactttggcactaatagcgatcattcgcttagcgtcttctatattattaactggttgatttaatctatctagcaatggaccgtcggacagcgtcattctcatgttcttaatcaatgtacatacatcgccgtcatctaccaattcatccaacaacataagctttttaaaatcatcattataataggtttgatcgttgtcatttctccaaagaatatatctaataagtagagtcctcatgcttagttaacaactattttttatgttaaatcaattagtacaccgctatgtttaatacttattcatattttagtttttaggattgagaatcaatacaaaaattaatgcatcattaattttagaaatacttagtttccacgtagtcaatgaaacatttgaactcatcgtacaggacgttctcgtacaggacgtaactataaaccggtttatatttgttcaagatagatacaaatccgataactttttttacgaattctacgggatccactttaaaagtgtcataccgggttctttttatttttttaaacagatcaatggtgtgatgttgattaggtcttttacgaatttgatatagaatagcgtttacatattctccataatggtcaatcgccatttgttcgtatgtcataaattctttaattatatgacactgtgtattatttagttcatccttgttcattgttaggaatctatccaaaatggcaattatactagaactataggtgcgttgtatacacatattgatgtgtctgtttatacaatccatgatatttggatccatgctactaccttcgggtaaaattgtagcatcatataccatttctagtactttaggttcattattatccattgcagaggacgtcatgatcgaatcataaaaaaatatattatttttatgttattttgttaaaaataatcatcgaatacttcgtaagatactccttcatgaacataatcagttacaaaacgtttatatgaagtaaagtatctacgatttttacaaaagtccggatgcataagtacaaagtacgcgataaacggaataataatagatttatctagtctatctttttctatagctttcatagttagatacatggtctcagaagtaggattatgtaacatcagcttcgataaaatgactgggttatttagtcttacacattcgctcatacatgtatgaccgttaactacagagtctacactaaaatgattgaacaatagatagtctaccattgtttcgtattcagatagtacagcgtagtacatggcatcttcacaaattatatcattgtctaatagatatttgacgcatcttatggatcccacttcaacagccatcttaaaatcatattgctttcctttatcattaataatttctagaacatcatctctatcataaaagatacaaatattaactgtttgatccgtaataacattgctagtcaatagcaatttgttaataagatgcgctgggctcaatgtcttaataagaagtgtaagaggactatctccgaatttgttttgtttattaacatccgttgatggaagtaaaagatctataatgtctacattcttgactgttttagagcatacaatatggagaggtgtatttccatcatgatctggttttgagggactaattcctagtttcatcatccatgagattgtagaagcttttggattgtctgacataagatgtctatgaatatgatttttgccaaatttatccactatcctggcttcgaatccgatggacattatttttttaaacactctttctgaaggatctgtacacgccaacaacggaccacatccttcttcatcaaccgagttgttaatcttggctccatactgtaccaataaatttattctctctatgacttcatcatctgttcccgagagataatatagaggtgttttatgctgtttatcacacgcgtttggatctgcgccgtgcgtcagcagcatcgcgactattctattattattaattttagaagctatatgcaatggataatttccatcatcatccgtctcatttggagagtatcctctatgaagaagttcttcgacaaatcgttcatctagtcctttaattccacaatacgcatgtagaatgtgataattatttccagaaggttcgatagcttgtagcatattcctaaatacatctaaatttttactattatatttggcataaagagatagataatactcggccgacataatgttgtccattgtagtataaaaattaatatttctatttctatttctgtatatttgcaacaatttactctctataacaaatatcataacttagtttttttatgtcaagaaggcactggtttagttcatctataaatgtcacgccataactaccacgcatgccatactcagaattatgataaagatatttatccttggggtgtaggtaatggggattaatctttgttggatcagtctctaagttaacacatgtcacacatgatccatttatagttatatcacacgatgatgatttatgaattgattccggaagatcgctatcgtattttgtggttccacaattcatttccatacatgttattgtcacactaatattatgatgaactttatctagccgctgagtggtaaacaacagaacagatagtttattatctttaccaacaccctcagccgctgccacaaatctctgatccgtatccatgatggtcatgtttatttctagtccgtatccagtcaacactatgttagcatttctgtcgatatagctttcactcatatgacactcaccaataatagtagaattaatgtcgtaatttacaccaatagtgagttcggcggcaaagtaccaataccggtaatcttgtcgaggaggacatatagtattcttgtattctaccgaatacccgagagatgcgatacaaaagagcaagactaatttgtaaaccatcttactcaaaatatgtaacaatagtacgatgcaatgagtaagacaataggaaatctatcttatatacacataattattctatcaattttaccaattagttagtgtaatgttaacaaaaatgtgggagaatctaattagtttttctttacacaattgacgtacatgagtctgagttccttgtttttgctaattatttcatccaatttattattcttgacgatatcgagatcttttgtataggagtcaaacttgtattcaacatgcttttctataatcattttagctatttcggcatcatccaatagtacattttccagattagcagaatagatattaatgtcgtatttgaacagagcctgtaacatctcaatgtctttattatctatagccaatttaatgtccggaatgaagagaagggaattattggtgtttgtcgacgtcatatagtcgagcaagagaatcatcatatccacgtgtccattttttatagtgatgtgaatacaactaaggagaatagccagatcaaaagtagatggtatctctgaaagaaagtaggaaacaatacttacatcattaagcatgacggcatgataaaatgaagttttccatccagttttcccatagaacatcagtctccaatttttcttaacaaacagttttaccgtttgcatgttaccactatcaaccgcataatacaatgcggtgtttcccttgtcatcaaattgtgaatcatccagtccactgaatagcaaaatctttactattttggtatcttccaatgtggctgcctgatgtaatggaaattcattctctagaagatttttcaatgctccagcgttcaacaacgtacatactagacgcacgttattatcagctattgcataatacaaggcactatgtccatggacatccgccttaaatgtatctttactagagagaaagcttttcagctgcttagacttccaagtattaattcgtgacagatccatgtctgaaacgagacgctaattagtgtatattttttcattttttataattttgtcatattgcaccagaattaataatatctttaatagatctgattagtagatacatggctatcgcaaaacaacatatacacatttaataaaaataatatttattaagaaaattcagatttcacgtacccatcaatataaataaaataatgattccttacaccgtacccatattaaggagattccaccttacccataaacaatataaatccagtaatatcatgtctgatgatgaacacaaatggtgtattaaattccagtttttcaggagatgatctcgccgtagctaccataatagtagatgcctctgctacagttccttgttcgtcgacatctatctttgcattctgaaacattttataaatatataatgggtccctagtcatatgtttaaacgacgcattatctggattaaacatactaggagccatcatttcggctatcgacttaatatccctcttattttcgatagaaaatttagggagtttaagattgtacactttattccctaattgagacgaccaatagtctaattttgcagccgtgatagaatctgtgaaatgggtcatattatcacctattgccaggtacatactaatattagcatccttatacggaaggcgtaccatgtcatattctttgtcatcgattgtgattgtatttccttgcaatttagtaactacgttcatcatgggaaccgttttcgtaccgtacttattagtaaaactagcattgcgtgttttagtgatatcaaacggatattgccatatacctttaaaatatatagtattaatgattgcccatagagtattattgtcgagcatattagaatctactacattagacataccggatctacgttctactatagaattaattttattaaccgcatctcgtctaaagtttaatctatataggccgaatctatgatattgttgataatacgacggtttaatgcacacagtattatctacgaaactttgataagttagatcagtgtacgtatatttagatgttttcagcttagctaatcctgatattaattctgtaaatgctggacccagatctctttttctcaaatccatagtcttcaataattctattctagtattacctgatgcaggcaatagcgacataaacatagaaaacgaataaccaaacggtgagaagacaatattatcatcttgaatatttttatacgctactataccggcattggtaaatccttgtagacgataggcggacgctgaacacgctaacgatagtatcaataacgcaatcatgattttatggtattaataattaaccttatttttatgttcggtataaaaaaattattgatgtctacacatccttttgtaattgacatctatatatccttttgtataatcaactctaatcactttaacttttacagttttccctaccagtttatccctatattcaacatatctatccatatgcatcttaacactctctgccaagatagcttcagagtgaggatagtcaaaaagataaatatatagagcataatcattctcgtatactctgccctttattacatcacccgcattgggcaacgaataacaaaatgcaagcatcttgttaacgggctcgtaaattgggataaaaattatgtttttattgtcttatatctattttattcaagagaatattcaggaatttctttttccggttgtatctcgtcgcagtatatatcatttgtacattgtttcatattttttaatagtttacaccttttagtaggactagtatcgtacaattcatagctgtattttgaattccaatcacgcataaaaatatcttccaattgttgacgaagacctaatccatcatccggtgtaatattaatagatgctccacatgtatccgtaaagtaatttcctgtccaatttgaggtacctatataggccgttttatcggttaccatatatttggcatggtttaccctagaatacggaatgggaggatcagcatctggtacaataaatagctttacttctatatttatgtttttagattttagcatagcgatagatcttaaaaagtttctcatgataaacgaagatcgttgccagcaactaatcaatagcttaacggatacttgtctgtctatagcggatcttcttaattcatcttctatataaggccaaaacaaaattttacccgccttcgaataaataatagggataaagttcataacagatacataaacgaatttactcgcatttctaatacatgacaataaagcggttaaatcattggttctttccatagtacatagttgttgcggtgcagaagcaataaatacagagtgtggaacgccgcttacgttaatactaagaggatgatctgtattataatacgacggataaaagtttttccaattatatggtagattgttaactccaagataccagtatacctcaaaaatttgagtgagatccgctgccaagttcctattattgaagatcgcaatacccaattccttgacctgagttagtgatctccaatccatgttagcgcttcctaaataaatatgtgtattatcagatatccaaaattttgtatgaagaactcctcctaggatatttgtaatatctatgtatcgtacttcaactccggccatttgtagtctttcaacatcctttaatggtttgttagatttattaacggctactctaactcgtactcctcttttgggtaattgtacaatctcgtttaatattatcgtgccgaaattcgtacccacttcatccgataaactccaataaaaagatgatatatctagtgtttttgtggtattggatagaatttccctccacatgttaaatgtagacaaatatactttatcaaattgcatacctataggaatagtttctgtaatcactgcgattgtattatccggattcattttatttgttaaaagaataatcctatatcacttcactctattaaaaatccaagtttctatttctttcatgactgattttttaacttcatccgtttccttatgaagatgatgtttggcaccttcataaatttttatttctctattacaatttgcatgttgcatgaaataatatgcacctaaaacatcgctaatcttattgtttgttccctggagtatgagagtcggggggtgttaatcttggaaattatttttctaaccttgttggtagccttcaagacctgactagcaaatccagccttaattttttcatgattgactaatgggtcgtattggtatttataaactttatccatatctctagatactgattctggacatagctttccgactggcgcatttggtgtgatggttcccataagtttggcagctagcagattcagtcttgaaacagcatctgcattaactagaggagacattagaatcattgctgtaaacaagtttggattatcgtaagaggctagctcccatggaatgacccaataagtagatttaatagttaccacgtgctgtaccaaagtcatcaatcatcattttttcaccattacttcttccatgtccaatatgatcatgtgagaatactaaaattcctaacgatgatatgttttcagctagttcgtcataacgtccagaatgtttaccagctccatgacttatgaatactaatgccttaggatatgtaataggtttccaatatttacaatatatgtaatcattgtccagattgaacatacagtttgcactcatgattcacgttatataactatcaatattaacagttcgtttgatgatcatattatttttatgttttattgataattgtaaaaacatacaattaaatcaatatagaggaaggagacggctactgtcttttgtaagatagtcatggcgactaaattagattatgaggatgctgttttttactttgtggatgatgataaaatatgtagtcgcgactccatcatcgatctaatagatgaatatattacgtggagaaatcatgttatagtgtttaacaaagatattaccagttgtggaagactgtacaaggaattgatgaagttcgatgatgtcgctatacggtactatggtattgataaaattaatgagattgtcgaagctatgagcgaaggagaccactacatcaattttacaaaagtccatgatcaggaaagtttattcgctaccataggaatatgtgctaaaatcactgaacattggggatacaaaaagatttcagaatctagattccaatcattgggaaacattacagatttgatgaccgacgataatataaacatcttgatactttttctagaaaaaaaattgaattgatgatataggggtcttcataacgcataattattacgttagcattctatatccgtgttaaaaaaaattatcctatcatgtatttgagagttttatatgtagcaaacatgatagctgtgatgccaataagctttagatattcacgcgtgctagtgttagggatggtattatctggtggtgaaatgtccgttatataatctacaaaacaatcatcgcatatagtatgcgatagtagagtaaacatttttatagtttttactggattcatacatcgtctacccaattcggttataaatgaaattgtcgccaatcttacacccaaccccttgttatccattagcatagtattaacttcgttatttatgtcataaactgtaaatgattttgtagatgccatatcatacatgatattcatgtccctattataatcattactaactttatcacaatatatgttgataatatctatatatgatctagtctttgtgggcaactgtctatacaagtcgtctaaacgttgtttactcatatagtatcgaacagccatcattacatggtcccgttccgttgatagataatcgagtatgttagtggacttgtcaaatctatataccatattttctggaagtggatatacatagtcgtgatcaacattattgctagcctcatcttctatatcctgtactataccattatctatatcatctacataatctatgatattattacacataaacatcgacaacatactattgtttattatctaagtcctgttgatccaaacccttgatctcctctatttgtactatctagagattgtacttcttccagttctggataatatatacgttgatagattagctgagctattctatctccagtatttacattaaacgtacattttccattattaataagaatgactcctatgtttcccctataatcttcgtctattacaccacctcctatatcaatgccttttagtgacagaccagacctaggagctattctaccatagcagaacttaggcatggacatactaatatctgtcttaattaactgtctttctcctggagggatagtataatcgtaagcgctatacaaatcatatccggcagcacccggcgattgcctagtaggagatttagctctgttagtttccttaacaaatctaactggtgagttaatattcatgttgaacataaaactaatattttatttcaaaattatttaccatcccatatattccatgaataagtgtgatgattgtacacttctatagtatctatatacgatccacgataaaatcctcctatcaatagcagtttattatccactatgatcaattctggattatccctcggataaataggatcatctatcagagtccatgtattgctggattcacaataaaattccgcatttctaccaaccaagaataaccttctaccgaacactaacgcgcatgatttataatgaggataataagtggatggtccaaactgccactgatcatgattgggtagcaaatattctgtagttgtatcagtttcagaatgtcctcccattacgtatataacattgtttatggatgccactgctggattacatctaggtttcagaagactcggcatattaacccaagcagcatccccgtggaaccaacgctcaacagatgtgggatttggtagacctcctactacgtataatttattgttagcgggtatcccgctagcatacagtctggggctattcatcggaggaattggaatccaattgtttgatatataatttacagctatagcattgttatgtatttcattgttcatccatccaccgatgagatatactacttctccaacatgagtacttgtacacatatggaatatatctataatttgatccatgttcataggatactctatgaatggatacttgtatgatttgcgtggttgtttatcacaatgaaatattttggtacagtctagtatccattttacattatttatacctctgggagaaagataatttgacctgattacatttttgataaggagtagcagatttcctaatttatttcttcgcctcatataccacttaatgacaaaatcaactacataatcctcatctggaacatttagttcatcgctttctagaataagtttcatagatagataatcaaaattgtctatgatgtcatcttccagttccaaaaagtgtttggcaataaagtttttagtatgacataagagattggatagtccgtattctatacccatcatgtaacactcgacacaatattcctttctaaaatctcgtaagataaagtttatacaagtgtagatgataaattctacagaggttaatatagaagcacgtaataaattgacgacgttatgactatctatatatacctttccagtatatgagtaaataactatagaagttaaactgtgaatgtcaaggtctagacaaacccttgtaactggatctttatttttcgtgtatttttgacgtaaatgtgtgcgaaagtaaggagataactttttcaatatcgtagaattgactattatattgcctcctatggcatcaataattgttttgaatttcttagtcatagacaatgctaatatattcttacagtacacagtattgacaaatatcggcatttatgtttctttaaaagtcaacatctagagaaaaatgattatctttttgagacataactcccattttttggtattcacccacacgtttttcgaaaaaattagtttttccttccaatgatatattttccatgaaatcaaacggattggtaacattataaatttttttaaatcccaattcagaaatcaatctatccgcgacgaattctatatatgttttcatcatttcacaattcattcctataagtttaactggaagagccgcagtaagaaattcttgttcaatggatactgcatctgttataatagatctaacggtttcttcactcggtggatgcaataaatgtttaaacatcaaacatgcgaaatcgcagtgcagaccctcgtctctactaattagttcgttggaaaacgtgagtccgggcattaggccacgctttttaagccaaaatatggaagcgaatgatccagaaaagaaaattccttctactgcagcaaaggcaataagtctctctccataaccggcgctgtcatgtatccacttttgagcccaatcggccttcttttttacacaaggcatcgtttctatggcattaaagagatagtttttttcattactatctttaacataagtatcgatcaaaagactatacatttccgaatgaatgttttcaatggccatctgaaatccgtagaaacatctagcctcggtaatctgtacttctgtacaaaatcgttccgccaaattttcattcactattccgtcactggctgcaaaaaacgccaatacatgttttataaaatatttttcgtctggtgttagtttattccaatcattgatatctttagatatatctacttcttccactgtccaaaatgatgcctctgcctttttatacatgttccagatgtcatgatattggattgggaaaataacaaatctatttggatttggtgcaaggatgggttccataactaaattaacaataacaataaattttttttcagttatctatatgcctgtacttggattttttgtacatcgatatcgccgcaatcactacaataattacaagtattattgatagcattgttattagtactatcataattaaattatctacattcatgggtgctgaataatcgttattatcatcattatcattttgtaattgtgacatcatactagataaatcgtttgcgagattgttgtgggaagcgggcatggaggatgcattatcattattatttaacgccttccatttggattcacaaatgttacgcacattcaacattttatggaaactataattttgtgaaaacaaataacaagaaaactcgtcatcgttcaaatttttaacgatagtaaaccgattaaacgtcgagctaatttctaacgctagcgactctgttggatatgggtttccagatatatatcttttcagttcccctacgtatctataatcatctgtaggaaatggaagatatttccatttatctactgttcctaatatcatatgtggtggtgtagtagaaccattaagcgcgaaagatgttatttcgcatcgtattttaacttcgcaataatttctggttagataacgcactctaccagtcaagtcaatgatattagcctttacagatatattcatagtagtcgtaacgatgactccatcttttagatgcgatactcctttgtatgtaccagaatcttcgtacctcaaactcgatatatttaaacaagttaatgagatattaacgcgttttatgaatgatgatatataaccagaagttttatcctcggtggctagcgctataaccttatcattataataccaactagtgtgattaatatgtgacacgtcagtgtgggtacaaatatgtacattatcgtctacgtcgtattcgatacatccgcatacagccaacaaatataaaatgacaaatactctaacgccgttcgtacccatcttgatgcggtttaataaatgttttgatttcaatttattgtaaaaaaagattcggttttatactgttcgatattctcattgcttatattttcatctatcatctccacacagtcaaatccgtggttagcatgcacctcatcaaccggtaaaagactatcggactcttctatcattataactctagaatatttaatttggtcattattaatcaagtcaattatcttatttttaacaaacgtgagtattttactcattttttataaaaacttttagaaatatacagactctatcgtgtgtctatatcttctttttatatccaatgtatttatgtctgatttttcttcatttatcatatataatggtccaaattctacacgtgcttcggattcatccagatcattaaggttcttataattgtaacatccttctcttccctcttctacatcttccttcttattcttattcttagcgtcacagaatctaccacagcaggatcccatgacgagcgtcatattaaactaatccattttcaattataatatatgattagtaatgaccattaaaataaaaaatattcttcataaccggcaagaaagtgaaaagttcacattgaaactatgtcagtagtatacatcatgaaatgatgatatatatatactctattttggtggaggattatatgatataattcgtggataatcatttttaagacacatttctttattcgtaaatcttttcacgttaaatgagtgtccatattttgcaatttcttcatatgatggcggtgtacgtggacgaggctgctcctgttcttgttgtggtcgccgactgtcgtgtctgcgtttagatccctccattatcgcgattgcgtagatggagtactattttataccttgtaattaaatttttttattaattaaacgtataaaaacgttccgtatctgtatttaagagccagatttcgtctaatagaacaaatagctacagtaaaaataactagaataattgctacacccactagaaaccacggatcgtaatacggcaatcggttttcgataataggtggaacgtatattttatttaaggacttaacaattgtctgtaaaccacaatttgcttccgcggatcctgtattaactatctgtaaaagcatatgttgaccgggcggagccgaacattctccgatatctaatttctgtatatctataatattattaacctccgcatacgcattacagttcttttctagcttggataccgcactaggtacatcgtctagatctattcctatttcctcagcgatagctcttctatccttttccggaagcaatgaaatcacttcaataaatgattcaaccatgagtgtgaaactaagtcgagaattactcatgcatttgttagttattcggagcgcgcaatttttaaactgtcctataacctctcctatatgaatagcacaagtgacattagtagggatagaatgttgagctaatttttgtaaataactatctataaaaagattatacaaagttttaaactctttagtttccgccatttatccagtctgagaaaatgtctctcataataaatttttccaagaaactaattgggtgaagaatggaaacctttaatctatatttatcacagtctgttttggtacacatgatgaattcttccaatgccgtactaaattcgatatctttttcgatttctggatatgtttttaataaagtatgaacaaagaaatggaaatcgtaataccagttatgtttaactttgaaattgttttttattttcttgttaatgattccagccacttgggaaaagtcaaagtcgtttaatgccgatttaatacgttcattaaaaacaaactttttatcctttagatgaattattattggttcattggaatcaaaaagtaagatattatcgggtttaagatctgcgtgtaaaaagttgtcgcaacagggtagttcgtagattttaatgtataacagagccatctgtaaaaagataaactttatgtattgtaccaaagatttaaatcctaatttgatagctaactcggtatctactttatctgccgaatacagtgctaggggaaaaattataatgtttcctctttcatattcgtagttagttctcttttcatgttcgaaaaagtgaaacatgcggttaaaatagtttataacattaatattactgttaataactgccggataaaagtgggatagtaatttcacgaatttgatactgtcctttctctcgttaaacgcctttaaaaaaactttagaagaatatctcaatgagagttcctgaccatccatagtttgtatcaataatagcaacatatgaagaacacgtttatacagagtatgtaaaaatgttaatttatagtttaatcccatggcccacgcacacacgattaattttttttcatctccctttagattgttgtatagaaatttgggtactgtgaactccgccgtagtttccatgggactatataattttgtggcctcgaatacaaattttactacatagttatctatcttaaagactataccatatcctcctgtagatatgtgataaaaatcgtcgtttataggataaaatcgtttatccttttgttggaaaaaggatgaattaatgtaatcattctcttctatctttagtagtgtttccttattaaaattcttaaaataatttaacaatctaactgacggagcccaattttggtgtaaatctaattgggacattatattgttaaaatacaaacagtctcctaatataacagtatctgataatctatggggagacatccattgatattcaggggatgaatcattggcaacacccatttattgtacaaaaagccccaatttacaaacgaaagtccaggtttgatagagacaaacaattaactattttgtctctgtttttaacacctccacagtttttaatttctttagtaatgaaattattcacaatatcagtatcttctttatctaccagagattttactaacttgataaccttggctgtctcattcaatagggtagtaatatttgtatgtgtgatattgatatctttttgaattgtttcttttagaagtgattctttgatggtgccagcatacgaattacaataatgcagaaactcggttaacatgcaggaattatagtaagccaattccaattgttgcctgtgttgtattagagtgtcaatatgagcaatggtgtccttgcgtttctctgatagaatgcgagcagcgattttggcgttatcatttgacgatatttctggaatgacgaatcctgtttctactaactttttggtaggacaaagtgaaacaatcaagaagatagcttctcctcctatttgtggaagaaattgaactcctctagatgatctactgacgatagtatctccttgacagatattggaccgaattacagaagtacctggaatgtaaagccctgaaaccccctcattttttaagcagattgttgccgtaaatcctgcactatgcccaagatagagagctcctttggtgaatccatctctatgtttcagtttaaccaagaaacagtcagctggtctaaaatttccatctctatctaatacagcatctaacttgatgtcaggaactatgaccggtttaatgttatatgtaacattgagtaaatccttaagttcataatcatcactgtcatcagttatgtacgatccaaacaatgtttctaccggcatagtggatacgaagatgctatccatcagaatgtttccctgattagtattttctatatagctattcttctttaaacgattttccaaatcagtaactatgttcatttttttaggagtaggacgcctagccagtatggaagaggattttctagatcctctcttcaacatctttgatctcgatggaatgcaaaaccccatagtgaaacaaccaacgataaaaataatattgtttttcactttttataattttaccatctgactcatggattcattaatatctttataagagctactaacgtataattctttataactgaactgagatatatacaccggatctatggtttccataattgagtaaatgaatgctcggcaataactaatggcaaatgtatagaacaacgaaattatactagagttgttaaagttaatattttctatgagctgttccaataaattatttgttgtgactgcgttcaagtcataaatcatcttgatactatccagtaaaccgtttttaagttctggaatattatcatcccattgtaaagcccctaattcgactatcgaatatcctgctctgatagcagtttcaatatcgacggacgtcaatactgtaataaaggtggtagtattgtcatcatcgtgataaactacgggaatatggtcgttagtaggtacggtaactttacacaacgcgatatataactttccttttgtaccatttttaacgtagttgggacgtcctgcagggtattgttttgaagaaatgatatcgagaacagatttgatacgatatttgttggattcctgattattcactataatataatctagacagatagatgattcgataaatagagaaggtatatcgttggtaggataatacatccccattccagtattctcggatactctattgatgacactagttaagaacatgtcttctattctagaaaacgaaaacatcctacatggactcattaaaacttctaacgctcctgattgtgtctcgaatgcctcgtacaaggatttcaaggatgccatagattctttgaccaacgatttagaattgcgtttagcatctgatttttttattaaatcgaatggtcggctctctggtttgctaccccaatgataacaatagtcttgtaaagataaaccgcaagaaaatttatacgcatccatccaaataaccctagcaccatcggatgatattaatgtattattatagattttccatccacaattattgggccagtatactgttagcaacggtatatcgaatagattactcatgtaacctactagaatgatagttcgtgtactagtcataatatctttaatccaatctaaaaaatttaaaattagattttttacactgttaaagttaacaaaagtattacccgggtacgtggatatcatatatggcattggtccattatcagtaatagctccataaactgatacggcgatggtttttatatgtgtttgatctaacgaggaagaaattcgcgcccacaattcatctctagatatgtatttaatatcaaacggtaacacatcaatttcgggacgcgtatatgtttctaaatttttaatccaaatataatgatgacctatatgccctattatcatactgtcaactatagtacacctagggaacttacgatacatctgtttcctataatcgttaaattttacaaatctataacatgctaaaccttttgacgacagccattcattaatttctgatatggaatctgtattctcgataccgtatcgttctaaagccagtgctatatctccctgttcgtgggaacgctttcgtataatatcgatcaacggataatctgaagtttttggagaataatatgactcatgatctatttcgtccataaacaatctagacataggaattggaggcgatgatcttaattttgtgcaatgagtcgtcaatcctataacttctaatcttgtaatattcatcatcgacataatactatctatgttatcatcgtatattagtataccatgaccttcttcatttcgtgccaaaatgatatacagtcttaaatagttacgcaatatctcaatagtttcataattgttagctgttttcatcaaggtttgtatcctgtttaacatgatggcgttctataacgtctctattttctatttttaattttttaaatttttaacgatttactgtggctagatacccaatctctctcaaatatttttttagcctcgcttacaagctgtttatctatactattaaaactgacgaatccgtgattttggtaatgggttccgtcgaaatttgccgaagtgatatgaacatattcgtcgtcgactatcaacaattttgtattattctgaatagtgaaaaccttcacagatagatcattttgaacacacaacgcatctagacttttggcggttgccatagaatatacgtcgttcttatcccaattaccaactagaagtctgatcttaactcctctattaatggctgcttctataatggagttgtaaatgtcgggccaatagtagctattaccgtcgacacgtgtagtgggaactatggccaaatgttcaatatctatactagtcttagctgacctgagtttatcaataactacatcggtatctagatctctagaatatcccaataggtgttccggagaatcagtaaagaacactccacctataggattcttaatatgatacgcagtgctaactggcaaacaacaagccgcagagcataaattcaaccatgaattttttgcgctattaaaggctttaaaagtatcaaatcttctacgaagatctgtggccagcgggggataatcagaatatacacctaacgttttaatcgtatgtatagatcctccagtaaatgacgcgtttcctacataacatctttcatcatctgacacccaaaaacaaccgagtagtagtcccacattattttttttatctatattaacggttataaaatttatatccgggcagtgactttgtagctctcccagatttcttttccctcgttcatctagcaaaactattattttaatccctttttcagatgcctcttttagtttatcaaaaataagcgctcccctagtcgtactcagaggattacaacaaaaagatgctatgtatatatatttcttagctagagtgataatttcgttaaaacattcaaatgttgttaaatgatcggatctaaaatccatattttctggtagtgtttctaccagcctacattttgctcccgcaggtaccgatgcaaatggccacatttagttaacataaaaacttatacatcctgttctatcaacgattctagaatatcatcggctatatcgctaaaattttcatcaaagtcgacatcacaacctaactcagtcaatatattaagaagttccatgatgtcatcttcgtctatttctatatccgtatccattgtagattgttgaccgattatcgagtttaaatcattactaatactcaatccttcagaatacaatctgtgtttcattgtaaatttataggcggtgtatttaagttggtagattttcaattatgtattaatatagcaacagtagttcttgctcctccttgattctagcatcctcttcattattttcttctacgtacataaacatgtccaatacgttagacaacacaccgacgatggcggccgctacagacacgaatatgactaaaccgatgaccatttaaaaacccctctctagctttcacttaaactgtatcgatcattcttttagcacatgtataatataaaaacattattctatttcgaatttaggcttccaaaaatttttcatccgtaaaccgataataatatatatagacttgttaatagtcggaataaatagattaatgcttaaactatcatcatctccacgattagagatacaatatttacattctttttgctgtttcgaaactttatcaatacacgttaatacaaacccaggaaggagatattgaaactgaggctgttgaaaatgaaacggtgaatacaataattcagataatgtaaaatcatgattccgtattctgatgatattagaactgctaatggatgtcgatggtatgtatctaggagtatctattttaacaaagcatcgatttgctaatatacaattatccttttgattaattgttattttattcatattcttaaaaggtttcatatttatcaattcttctacattaaaaatttccatttttaatttatgtagccccgcaatactcctcattacgtttcattttttgtctataatatccattttgttcatctcggtacatagattatccaattgagaagcgcatttagtagttttgtacattttaagtttattgacgaatcgtcgaaaactagttatagttaacattttattatttgataccctgatattaatacccctgccgttactattatttataactgatgtaatccacgtaacattggaattaactatcgatagtaatgcatcgacgcttccaaaattgtctattataaactcaccgataatttttttattgcatgttttcatattcattaggattatcaaatctttaatcttattacgattgtatgcgttgatattacaagacgtcattctaaaagacggaggatctccatcaaatgccagacaatcacgtacaaagtacatggaaataggttttgttctattgcgcatcatagatttatatagaacacccgtagaaatactaatttgttttactctataaaatactaatgcatctatttcatcgttttgtataacgtctttccaagtgtcaaattccaaatttttttcattgatagtaccaaattcttctatctctttaactacttgcatagataggtaattacagtgatgcctacatgccgttttttgaaactgaatagatgcgtctagaagcgatgctacgctagtcacaatcaccactttcatatttagaatatatatatgtaaaaatatagtagaatttcattttgtttttttctatgctataaatgaattctcattttgcatctgctcatactccgttttatattaataccaaagaaggaagatatctggttctaaaagccgttaaagtatgcgatgttagaactgtagaatgcgaaggaagtaaagcttcctgcgtactcaaagtagataaaccctcatcgcccgcgtgtgagagaagaccttcgtccccgtccagatgcgagagaatgaataaccctggaaaacaagttccgtttatgaggacggacatgctacaaaatatgttcgcggctaatcgcgataatgtagcttctagacttttgtcctaaaatactattatatccttttcgatattaataaatccgtgtcgtccaggttttttatctctttcagtatgtgaatagataggtattttatctctattcatcatcgaatttaagagatccgataaacattgtttgtattctccagatgtcagcatctgatacaacaatatatgtgcacataaacctctggcacttatttcatgtaccttccccttatcactaaggagaatagtatttgagaaatatgtatacatgatattatcatgaattagatatacagaatttgtaacactctcgaaatcacacgatgtgtcggcgttaagatctaatatatcactcgataacacattttcatctagatacactagacattttttaaagctaaaatagtctttagtagtaacagtaactatgcgattattttcatcgatgatacatttcatcggcatattattacgcttaccatcaaagactataccatgtgtatatctaacgtattctagcatggttgccatacgcgcattaaacttttcaggatctttggatagatcttccaatctatctatttgagaaaacatttttatcatgttcaatagttgaaacgtcggatccactatatagatattatctataaagattttaggaactacgttcatggtatcctggcgaatattaaaactatcaatgatatgattatcgttttcatcttttatcaccatatagtttctaagatatgggattttacttaatataatattatttcccgtgataaattttattagaaaggccaaatctataagaaaagtcctagaattagtctgaagaatatctatatcgccgtatagtatatttggattaattagatatagagaatatgatccgtaacatatacaacttttattatggcgtctaagatattcttccatcaacttattaacatttttgactagggaagatacattatgacgtcccattacttttgccttgtctattactgcgacgttcatagaatttagcatatctcttgccaattcttccattgatgttacattataagaaattttagatgaaattacatttggagctttaatagtaagaactcctaatatgtccgtgtatgtggtcactaatacagattgtagttctataatcgtaaataatttacctatattatatgtttgagtctgtttagaaaagtagctaagtatacgatcttttatttctgatgcagatgtattaacatcggaaaaaaatctttttttattcttttttactaaagatacaaatatgtctttgttaaaaacagttattttctgaatatttctagcttgtaattttaacatatgatattcgttcacactaggtactctgcctaaataggtttctataatctttaatgtaatattaggaaaagtattctgatcaggattcctattcattttgaggatttaaaactctgattattgtctaatatggtctctacgcaaactttttcacagagcgatagagtttttgataactcgtttttcttaagaaatataaaactactgtctccagagctcgctctatcttttattttatctaattcgatacaaactcctgatactggttcagaaagtaattcattaattttcagtcctttatagaagatatttaatatagataatacaaaatcttcagtttttgatatcgatctgattgatcctagaactagatatattaataacgtgctcattaggcagtttatggcagcttgataattagatatagtatattccagttcatatttattagataccgcattgcccagattttgatattctatgaattcctctgaaaataaatccaaaataactagacattctattttttgtggattagtgtactctcttccctctatcatgttcactactggtgtccacgatgataaatatctagagggaatataatatagtccataggatgccaatctagcaatgtcgaataactgtaattttattcttcgctcttcattatgaattgattcttgaggtataaacctaacacaaattatattattagacttttcgtatgtaatgtctttcatgttataagtttttaatcctggaatagaatctattttaatgaggcttttaaacgcagagttctccaacgagtcaaagcataatactctgttgtttttcttatatacgatgttacgattttcttctttgaatggaataggtttttgaattagtttataattacaacataatagataaggaagtgtgcaaatagtacgcggaaaaaacataatagctcccctgttttcatccatggttttaagtaaatgatcactggcttctttagtcaatggatattcgaacattaaccgtttcatcatcattggacagaatccatatttcttaatgtaaagagtgatcaaatcattgtgtttattgtaccatcttgttgtaaatgtgtattcggttatcggatctgctcctttttctattaaagtatcgatgtcaatctcgtctaagaattcaactatatcgacatatttcatttgtatacacataaccattactaacgtagaatgtataggaagagatgtaacgggaacagggtttgttgattcgcaaactattctaatacataattcttctgttaatacgtcttgcacgtaatctattatagatgccaagatatctatataattattttgtaagatgatgttaactatgtgatctatataagtagtgtaataattcatgtattttgatatatgttccaactctgtctttgtgatgtctagtttcgtaatatctatagcatcctcaaaaaatatattcgcatatattcccaagtcttcagttctatcttctaaaaaatcttcaacgtatggaatataataatctattttacctcttctgatatcattaatgatatagtttttgacactatcttctgtcaattgattcttattcactatatctaagaaacggatagcgtccctaggacgaactactgccattaatatctctattatagcttctggacataattcatctattataccagaattaatgggaactattccgtatctatctaacatagttttaagaaagtcagaatctaagacttgatgttcatatattggttcatacatgaaatgatctctattgatgatagtgactatttcattctctgaaaattggtaactcattctatatatgctttccttgttgatgaaggatagaatatactcaatagaatttgtaccaacaaactgttctcttatgaatcgtatatcatcatctgaaataatcatgtaaggcatacatttaacaattagagacttgtctcctgttatcaatatactattcttgtgataatttatgtgtgaggcaaatttgtccacgttctttaattttgttatagtagatatcaaatccaatggagctacagttcttggcttaaacagatatagtttttctggaacaaattctacaacattattataaaggactttgggtagataagtgggatgaaatcctattttaattaatgcgatagccttgtcctcgtgcagatatccaaacgcttttgtgatagtatggcattcattgtctagaaacgctctacgaatatctgtgacagatatcatctttagagaatatactagtcgcgttaatagtactacaatttgtattttttaatctatctcaataaaaaaattaatatgtatgattcaatgtataactaaactactaactgttattgataactagaatcagaatctaatgatgacgtaaccaagaagtttatctactgccaatttagctgcattatttttagcatctcgtttagattttccatcggccttatcgaatactcttccgtcgatgtctacacaggcataaaatgtaggagagttactaggcccaactgattcaatacgaaaagaccaatctctcctagtaatttggcagtactcattaataacggtgacagggttagcatctttccaatcaataatttttttagccggaataacatcatcaaaagacttatgatcctctctcattgatttttcgcgggatacatcatctattatgacgtcagccatagcatcagcatccggcttatccgcctccgttgtcataaaccaacgaggaggaatatcgtcggagctgtacaccatagcactacgttgaagatcgtacagagctttattaacttctcgcttctccatattaagttgtctagttagttgtgcagcagtagctccttcgattccaatgtttttaatagccgcacacacaatctctgcgtcagaacgctcgtcaatatagatcttagacatttttagagagaactaacgcaaccagcaataaaactgaacctactttatcatttttttattcatcatcctctggtggttcgtcgttcctatcaaatgtagctctgattaacccgtcatctataggtgatgctggttctggagattctggaggagatggattattatctggaagaatctctgttatttccttgttttcatgtatcgattgcgttgtaacattaagattgcgaaatgctctaaatttgggaggcttaaagtgttgtttgcaatctctacacgcgtgtctaactagtggaggttcgtcagctgctctagtttgaatcatcatcggcgtagtattcctacttttacagttaggacacggtgtattgtatttctcgtcgagaacgttaaaataatcgttgtaactcacatcctttattttatctatattgtattctactcctttcttaatgcattttataccgaataagagatagcgaaggaattctttttcggtgccgctagtacccttaatcatatcacatagtgttttatattccaaatttgtggcaatagacggtttatttctatacgatagtttgtttctggaatcctttgagtattctataccaatattattctttgattcgaatttagtttcttcgatattagattttgtattacctatattcttgatgtagtactttgatgatttttccatggcccattctattaagtcttccaagttggcatcatccacatattgtgatagtaattctcggatatcagtagcggctaccgccattgatgtttgttcattggatgagtaactactaatgtatacattttccatttataacacttatgtattaactttgttcatttatattttttcattattatgttgatattaacaaaagtgaatatatatatgttaataattgtattgtggttatacggctacaattttataatgagtgaaagtcagtgtccgatgatcaatgacgatagctttactctgaaaagaaagtatcaaatcgatagtgcggagtcaacaataaaaatggataagaagaggataaagtttcagaatagagccaaaatggtaaaagaaataaatcagacaataagagcagcacaaactcattacgagacattgaaactaggatacataaaatttaagagaatgattatgactactactctagaagatatagcaccatctattccaaataatcagaaaacttataaactattctcggacatttcagccatcggcaaagcatcacagaatccgagtaagatggtatatgctctgctgctttacatgtttcccaatttgtttggagatgatcatagattcattcgttatagaatgcatccaatgagtaaaatcaaacacaagatcttctctcctttcaaacttaatcttattagaatattagtggaagaaagattctataataatgaatgcagatctaataaatggagaataattggaacacaagttgataaaatgttgatagctgaatctgataaatatacaatagatgcaaggtataacctaaaacccatgtatagaatcaagggagaatctgaagaagataccctctttatcaaacagatggtagaacaatgtgtgacatcccaggaattggtggaaaaagtgttgaagatactgtttagagatttgttcaagagtggagaatacaaagcgtacagatacgatgatgatgtagaaaatggatttattggattggatacactaaaattaaacattgttcatgatatagttgaaccatgtatgcctgttcgtaggccagtggctaagatactgtgtaaagaaatggtaaataaatactttgagaatccgctacatattattggtaaaaatcttcaagagtgcattgactttgttagtgaataggcatttcatctttctccaatactaattcaaattgttaaattaataatggatagtataaatagttattagttataagatagtaaaaataattattagaataagagtgtagtatcatagataactctcttctataaaaatggattttattcgtagaaagtatcttatatacacagtagaaaataatatagattttttaaaggatgatacattaagtaaagtaaacaattttaccctcaatcatgtactagctctcaagtatctagttagcaattttcctcaacacgttattactaaggatgtattagctaataccaatttttttgttttcatacatatggtacgatgttgtaaagtgtacgaagcggttttacgacacgcatttgatgcacccacgttgtacgttaaagcattgactaagaattatttatcgtttagtaacgcaatacaatcgtacaaggaaaccgtgcataaactaacacaagatgaaaaatttttagaggttgccgaatacatggacgaattaggagaacttataggcgtaaattatgacttagttcttaatccattatttcacggaggggaacccatcaaagatatggaaatcatttttttaaaactgtttaagaaaacagacttcaaagttgttaaaaaattaagtgttataagattacttatttgggcatacctaagcaagaaagatacaggcatagagtttgcggataatgatagacaaaatatatacactctatttcaacaaactggtagaatcgtccatagcaatctaacagaaacgtttagagattatatctttcccggagataagactagctattgggtgtggttaaacgaaagtatagctaatgatgcggatatcgttcttaatagacacgccattaccatgtatgataaaattcttagttatatatactctgagataaaacaaggacgcgttaataaaaacatgcttaagttagtttatatctttgagcctgaaaaagatatcagagaacttctgctagaaatcatatatgatattcctggagatatcctatctattattgatgcaaaaaacgacgattggaaaaaatattttattagtttttataaagctaattttattaacggtaatacatttattagtgatagaacgtttaacgaggacttattcagagttgttgttcaaatagatcccgaatatttcgataatgaacgaattatgtctttattctctacgagtgctgcggacattaaacgatttgatgagttagatattaataacagttatatatctaatataatttatgaggtgaacgatatcacattagatacaatggatgatatgaagaagtgtcaaatctttaacgaggatacgtcgtattatgttaaggaatacaatacatacctgtttttgcacgagtcggatcccatggtcatagagaacggaatactaaagaaactgtcatctataaaatccaagagtagacggctgaacttgtttagcaaaaacattttaaaatattatttagacggacaattggctcgtctaggtcttgtgttagatgattataaaggagacttgttagttaaaatgataaaccatcttaagtctgtggaggatgtatccgcattcgttcgattttctacagataaaaaccctagtattcttccatcgctaatcaaaactattttagctagttataatatttccatcatcgtcttatttcaaaggtttttgagagataatctatatcatgtagaagaattcttggataaaagcatccatctaaccaagacggataagaaatatatacttcaattgataagacacggtagatcatagaacagaccaaatatattattaataatttgtatatacatagatataattatcacacatttttgataaatgggaactgctgcaacaattcagactcccaccaaattaatgaataaagaaaatgcagaaatgattttggaaaaaattgttgatcatatagttatgtatattagtgacgaatcaagtgattcagaaaataatcctgaatatattgattttcgtaacagatacgaagactatagatctctcattataaaaagtgatcacgagtttgtaaagctatgtaaaaatcatgcggagaaaagttctccagaaacgcaacaaatgattatcaaacacatatacgaacaatatcttattccagtatctgaagtactattaaaacctataatgtccatgggtgacataattacatataacggatgtaaagacaatgaatggatgctagaacaactctctaccctaaactttaacaatctccgcacatggaactcatgtagcataggcaatgtaacgcgtctgttttatacattttttagttatctgatgaaagataaactaaatatataagtataatcccattctaatactttaacctgatgtattagcatcttattagaatattaacctaactaaaagacataacataaaaactcattacatagttgataaaaagcggtaggatataaatattatggctgccaccgttccgcgttttgacgacgtgtacaaaaatgcacaaagaagaattctagatcaagaaacattttttagtagaggtctaagtagaccgttaatgaaaaacacatatctatttgataattacgcgtatggatggataccagaaactgcaatttggagtagtagatacgcaaacctagatgctagtgactattatcccatttcgttgggattacttaaaaagttcgagtttctcatgtctctatataaaggtcctattcccgtatatgaagaaaaagtaaatactgaattcatagccaatggatcgttctctggtagatacgtatcatatcttcgaaagttttctgcccttccaacaaacgagtttattagttttttgttactgacttccattccaatctataatatcttgttctggtttaaaaacacacagtttgatattactaaacacacattattcagatacgtctatacagataatgccaaacacctggcgttggctaggtatatgcatcaaacaggagactataagcctttgtttagtcgtctcaaagagaattatatatttaccggtcccgttccaataagtatcaaagatatagatcaccctaatcttagtagagcaagaagtccatccgattatgagacattagctaatattagtactatattgtactttaccaagtatgatccggtattaatgtttttattgttttacgtacctgggtattcaattactacaaaaattactccagccgtagaatatctaatggataaactgaatctaacaaagagcgacgtacaactgttgtaaattattttatgcttcgtaaaatgtaggttttgaaccaaacattctttcaaagaatgagatgcataaaactttattatccaatagattgactatttcggacgtcaatcgtttaaagtaaacttcgtaaaatattctttgatcactgccgagtttaaaacttctatcgataattgtctcatatgttttaatatttacaagttttttggtccatggtacattagccggacaaatatatgcaaaataatatcgttctccaagttctatagtttctggattatttttattatattcagtaactaaatacatattagggttatctgcggatttataatttgagtgatgcattctactcaacataaataattctagaggagacgatctactatcaaattcggatcgtaaatctgtttctaaagaacggagaatatctatacatacctgattagaattcatccgtccttcagacaacatctcagacagtctggttttgtacatcttaatcatattcttatgaaacttggaaacatctcttctagtttcactagtacctttattaattctctcaggtacagattttgaattcgacgatgctgagtatttcatcgttgtatatttcttcttcgattgcataatcagattcttatataccgcctcaaactctattttaaaattattaaacaatactctattattaatcagtcgttctaactctttcgctatttctatagacttatctacatcttgactgtctatctctgtaaacacggagtcggtatctccatacacgctacgaaaacgaaatctgtaatctataggcaacgatgttttcacaatcggattaatatctctatcgtccatataaaatggattacttaatggattggcaaaccgtaacataccgttagataactctgctccatttagtaccgattctagatacaagatcattctacgtcctatggatgtgcaactcttagccgaagcgtatgagtatagagcactatttctaaatcccatcagaccatatactgagttggctactatcttgtacgtatattgcatggaatcatagatggccttttcagttgaactggtagcctgttttagcatctttttatatctggctctctctgccaaaaatgttcttaatagtctaggaatggttccttctatcgatctatcgaaaattgctatttcagagatgaggttcggtagtctaggttcacaatgaaccgtaatatatctaggaggtggatatttctgaagcaatagctgattatttatttcttcttccaatctattggtactaacaacgacaccgactaatgtttccggagatagatttccaaagatacacacattaggatacagactgttataatcaaagattaatacattattactaaacattttttgttttggagcaaataccttaccgccttcataaggaaacttttgttttgtttctgatctaactaagatagttttagtttccaacaatagctttaacagtggacccttgatgactgtactcgctctatattcgaataccatggattgaggaagcacatatgttgacgcacccgcgtctgtttttgtttctactccataatactcccacaaatactgacacaaacaagcatcatgaatacagtatctagccatatctaaagctatgtttagattataatccttatacatctgagctaaatcaacgtcatcctttccgaaagataatttatatgtatcattaggtaaagtaggacataatagtacgactttaaatccattttcccaaatatctttacgaattactttacatataatatcctcatcaacagtcacataattacctgtggttaaaacctttgcaaatgcagcggctttgcctttcgcgtctgtagtatcgtcaccgatgaacgtcatttctctaactcctctatttaatactttacccatgcaactgaacgcgttcttggatatagaatccaatttgtacgaatccaatttttcaaatttttgaatgaatgaatatagatcgaaaaatatagttccattattgttattaacgtgaaacgtagtattggccatgccgcctactcccttatgactagactgatttctctcataaatacagagatgtacagcttcctttttgtccggagatctaaagataattttctctcctgttaataactctagacgattagtaatatatctcagatcaaagttatgtccgttaaaggtaacgacgtagtcgaacgttagttccaacaattgtttagctattcgtaacaaaactatttcagaacatagaactagttctcgttcgtaatccatttccattagtgactgtatcctcaaacatcctctatcgacggcttcttgtatttcctgttccgttaacatctcttcattaatgagcgtaaacaataatcgtttaccacttaaatcgatataacagtaacttgtatgcgagattgggttaataaatacagaaggaaacttcttatcgaagtgacactctatatctagaaataagtacgatcttgggatatcgaatctaggtatttttttagcgaaacagttacgtggatcgtcacaatgataacatccattgttaatctttgtcaaatattgctcgtccaacgagtaacatccgtctggagatatcccgttagaaatataaaaccaactaatattgagaaattcatccatggtggcattttgtatgctgcgtttctttggctcttctatcaaccacatatctgcgacggagcattttctatctttaatatctagattataacttattgtctcgtcaatgtctatagttctcatctttcccaacggcctcgcattaaatggaggaggagacaatgactgatatatttcgtccgtcactacgtaataaaagtaatgaggaaatcgtataaatacggtctcgccatttcgacatctggatttcagatataaaaatctgttttcaccgtgactttcaaaccaattaatgcaccgaacatccatttatagaatttagaaatatattttcatttaaatgaatcccaaacattggggaagagccgtatggaccattatttttatagtactttcgcaagcgggtttagacggcaacatagaagcgtgtaaacgaaaactatatactatagttagcactcttccatgtcctgcatgtagacggcacgcgactatcgctatagaggacaataatgtcatgtctagcgatgatctgaattatatttattattttttcatcagattatttaacaatttggcatctgatcccaaatacgcgatcgatgtgacaaaggttaaccctttataaacttaacccattataaaacttatgattagtcacaactgaaataaccgcgtgattattttttggtataattctacacggcatggtttctgtgactatgaattcaacccccgttacattagtgaaatctttaacaaacagcaagggttcgtcaaagacataaaactcattgtttacaatcgaaatagaccccctatcacacttaaaataaaaaatatccttatcctttaccaccaaataaaattctgattggtcaatgtgaatgtattcacttaacagttccacaaatttatttattaactccgaggcacatacatcgtcggtattttttatggcaaactttactcttccagcatccgtttctaaaaaaatattaacgagttccatttatatcatccaatattattgaaatgacgttgatggacagatgatacaaataagaaggtacggtacctttgtccaccatctcctccaattcatgctctattttgtcattaactttaatgtatgaaaacagtacgccacatgcttccatgacagtgtgtaacactttggatacaaaatgtttgacattagtataattgtccaagactgtcaatctataatagatagtagctataatatattctatgatggtattgaagaagatgacaaccttggcatattgatcatttaacacagacatggtatcaacagatagcttgaatgaaagagaatcagtaattggaataagcgtcttctcgatagagtgtccgtataccaacatgtctgatattttgatgtattccattaaattatttagttttttctttttattctcgttaaacagcatttctgtcaacggaccccaacatcgttgaccgattaagttttgattgatttttccgtgtaaggcgtatctagtcagatcgtatagcctatccaataatccatcgtctgtgtgtagatcacatcgtacactttttaattctctatagaagagcgacagacatctggagcaattacagacagcaatttctttattctctacagatgtaagatacttgaagacattcctatgatgatgcagaattttggataacacggtattgatggtatctgttaccataattcctttgatggctgatagtgtcagagcacaagatttccaatctttgacaatttttagcaccattatctttgttttgatatctatatcagacagcatggtgcgtctgacaacacagggattaagacggaaagatgaaatgattctctcaacatcttcaatagataccttgctattttttctggcattatctatatgtgcgagaatatcctctagagaatcagtatcctttttgatgatagtggatctcaatgacatgggacgtttaaaccttcttattctatcaccagattgcatggtgatttgtcttctttcttttatcataatgtaatctctaaattcatcggcaaattgtctatatctaaaatcataatatgagatgtttacctctacaaatatctgttcgtccaatgttagagtatttacatcagttttgtattccaaattaaacatggcaacggatttaattttatattcctctattaagtcctcgtcgataataacagaatgtagataatcatttaatccgtcgtacatggttggaagatgcttgttgacaaaatctttaattgtcttgatgaaggtgggactatatctaacatcttgattaataaaatttataacattgtccataggatactttgtaactagttttatacacatctcttcatcggtaagtttagacagaatatcgtgaacaggtggtatattatattcatcagatatacgaagaacaatgtccaaatctatattgtttaatatattatatagatgtagcgtagctcctacaggaatatctttaactaagtcaatgatttcatcaaccgttagatctattttaaagttaatcatataggcattgatttttaaaaggtatgtagccttgactacattctcattaattaaccattccaagtcattgtgtgtaagaagattatattctatcataagcttgactacatttggtcccgataccattaaagaattcttatgatataaggaaacagattttaggtactcatctactctacaagaattttggagagccttaacgatatcagtgacgtttattatttcaggaggaaagaatctaacattgagaatatcggaattaatagcttccagatacagtgattttggcaatagtccgtgtaatccataatccagtaacacgagctggtgcttgctagacaccttttcaatgtttaatttttttgaaataagctttgataaagccttcctcgcaaattccggatacatgaacatgtcggcgacatgattaagtattgttttttcattatttttatattttctcaacaagttctcaataccccaatagatgatagaatatcacccaatgcgtccatgttgtctatttccaacaggtcgctatatccaccaatagaagtttttccaaaaaagattctaggaacagttctaccaccagtaatttgttcaaaataatcccgcaattcattttcgggtttaaattctttaatatcgacaatttcatacgctcctcttttgaaactaaacttatttagaatatccagtgcatttctacaaaaaggacatgtatacttgacaaaaattgtcactttgttattggccaacctttgttgtacaaattcctcggccattttaatatttaagtgatataaaactatctcgacttatttaactctttagtcgagatatatggacgcagatagctatatgatagccaactacagaaggcaaacgctataaaaaacataattacgacgagcatatttataaatatttttattcagcattacttgatatagtaatattaggcacagtcaaacattcaaccactctcgatacattaactctctcattttctttaacaaattctgcaatatcttcgtaaaaagattcttgaaactttttagaatatctatcgactctagatgaaatagcgttcgtcaacatactatgttttgtatacataaaggcgcccattttaacagtttctagtgacaaaatgctagcgatcctaggatcctttagaatcacatagattgacgattcgtctctcttagtaactctagtaaaataatcatacaatctagtacgcgaaataatattatccttgacttgaggagatctaaacaatctagttttgagaacatcgataagttcatcgggaatgacatacatactatctttaatagaactcttttcatccagttgaatggattcgtccttaaccaactgattaatgagatcttctattttatcattttccagatgatatgtatgtccattaaagttaaattgtgtagcgcttctttttagtctagcagccaatactttaacatcactaatatcgatatacaaaggagatgatttatctatggcattaagaattcgtttttcgacatccgtcaaaaccaattcctttttgcctgtatcatccagttttccatcctttgtaaagaaattattttctactagactattaataagactgataaggattcctccataattgcacaatccaaactttttaacaaaactagactttacgagatctacaggaatgcgtacttcaggttttttagcttgtgattttttcttttgcggacattttctagtaaccaactcatctaccatttcattgattttagcagtgaaataagctttcaatgcacgggcactgatactattgaaaacgagttgatcttcaaattccgccatttaagttcaccaaacaacttttaaatacaaatatatcaatagtagtagaataagaactataaaaaaaataataattaaccaaccccaacaaccggtattattagttgatgtggtagttttctcatcacttagaacagatttaacaatttctataaagtctgtcaaatcatcttccggagaccccataaatacaccaaatatagcggcgtacaacttatccatttatacattgaatattggcttttctttatcgctatcttcatcatattcatcatcaatatcaacaagtcccagattacgagccagatcttcttctacattttcagtcattgatacacgttcactatctccagagagtccgataacgttagccaccacttctctatcaatgattagtttcttgagcgcgaaagtaatttttgtttccgttccggatctatagaagacgataggtgtgataattgccttggccaattgtctttctcttttactgagtgattctagttcaccttctatagatctgagaatggatgattctccagtcgaaacatattctaccatggatccgtttaatttgttgatgaagatggattcatccttaaatgttttctctgtaatagtttccaccgaaagactatgcaaagaatttggaatgcgttccttgtgcttaatgtttccatagacggcttctagaagttgatacaacataggactagccgcggtaacttttatttttagaaagtatccatcgcttctatcttgtttagatttatttttataaagtttagtctctccttccaacataataaaagtggaagtcatttgactagataaactatcagtaagttttatagagatagacgaacaattagcgtattgagaagcatttagtgtaacgtattcgatacattttgcattagatttactaatcgattttgcatactctataacacccgcacaagtctgtagagaatcgctagatgcagtaggtcttggtgaagtttcaactctcttcttgattaccttactcatgattaaacctaaataattgtactttgtaatataatgatatatattttcactttatctcatttgagaataaaaatgtttttgtttaaccactgcatgatgtacagatttcggaatcgcaaaccaccagtggttttattttatccttgtccaatgtgaattgaatgggagcggatgcgggtttcgtacgtagatagtacattcccgtttttagaccgagactccatccgtaaaaatgcatactcgttagtttggaataactcggatctgctatatggatattcatagattgactttgatcgatgaaggctcccctgtctgcagccatttttatgatcgtcttttgtggaatttcccaaatagttttataaactcgcttaatatcttctggaaggtttgtattctgaatggatccaccatctgccataatcctattcttgatctcatcattccataattttctctcggttaaaactctaaggagatgcggattaactacttgaaattctccagacaatactctccgagtgtaaatattactggtatacggttccaccgactcattatttcccaaaatttgagcagttgatgcagtcggcataggtgccaccaataaactatttctaagaccgtatgttctgattttatcttttagaggttcccaattccaaagatccgacggtacaacattccaaagatcatattgtagaataccgttactggcgtacgatcctacatatgtatcgtatggtccttccttctcagctagttcacaactcgcctctaatgcaccgtaataaatggtttcgaagatcttcttatttagatcttgtgcttccaggctatcaaatggataatttaagagaataaacgcgtccgctaatccttgaacaccaataccgataggtctatgtctcttattagagatttcagcttctggaataggataataattaatatctataattttattgagatttctgacaattactttgaccacatccttcagtttgagaaaatcaaatcgcccatctattacaaacatgttcaaggcaacagatgccagattacaaacggctacctcattagcatccgcatattgtattatctcagtgcaaagattactacacttgatagttcctaaattttgttgattactctttttgttacacgcatccttataaagaatgaatggagtaccagtttcaatctgagattctataatcgctttccagacgactcgagcctttattatagatttgtatctcctttctctttcgtatagtgtatacaatcgttcgaactcgtctccccaaacattgtccaatccaggacattcatccggacacatcaacgaccactctccgtcatccttcactcgtttcataaagagatcaggaatccaaagagctataaatagatctctggttctatgttcctcgtttcctgtattctttttaagatcgaggaacgccataatatcagaatgccacggttccaagtatatggccataactccaggccgtttgtttcctccctgatctatgtatctagcggtgttattataaactctcaacattggaataataccgtttgatataccattggtaccggagatatagcttccactggcacgaatattactaattgatagacctattccccctgccattttagagattaatgcgcatcgttttaacgtgtcatagataccctctatgctatcatcgatcatgttaagtagaaaacagctagacatttggtgacgactagttcccgcattaaataaggtaggagaagcgtgcgtaaaccatttttcagaaagtagattgtacgtctcaatagctgagtctatatcccattgatgaattcctactgcgacacgcattaacatgtgctgaggtctttcaacgatcttgttgtttattttcaacaagtaggatttttccaaagttttaaaaccaaaatagttgtatgaaaagtctcgttcgtaaataataaccgagttgagtttatccttatatttgttaactatatccatggtgatacttgaaataatcggagaatgtttcccatttttaggattaacatagttgaataaatcctccatcacttcactaaatagtttttttgtttccttgtgtagatttgatacggctattctggcggctagaatggcataatccggatgttgtgtagtacaagtggctgctatttcggctgccagagtgtccaattctaccgttgttactccattatatattccttgaataaccttcatagctattttaataggatctatatgatccgtgtttaagccataacataattttctaatacgagacgtgattttatcaaacatgacattttccttgtatccatttcgtttaatgacaaacatttttgttggtgtaataaaaaaattatttaacttttcattaatagggatttgacgtatgtagcgtacaaaatgattgttcctggtatatagataaagagtcctatatatttgaaaatcgttacggctcgattaaactttaatgattgcatagtgaatatatcattaggatttaactccttgactatcatggcggcgccagaaattaccatcaaaagcattaatacagttataccgatcgcagttagaacggttatagcatccaccatttatatctaaaaattagatcaaagaatatgtgacaaagtcctagttgtatactgagaattgacgaaacaatgtttcttacatatttttttcttattagtaaccgacttaatagtaggaactggaaaactagacttgattattctataagtatagatacccttccaaataatattctctttgataaaagttccagaaaatgtagaattttttaaaaagttatcttttgctattaccaagattgtgtttagacgcttattattaatatgagtgatgaaatccacaccgcctctagatatcgcctttatttccacattagatggtaaatccaatagtgaaactatctttttaggaatgtatggactcgcgtttagaggagtaaacgtcttaggcgtcggaaaggatgattcatcaaacgaataaacaatttcacaaatggatgttaatgtattagtaggaaattttttgacgctattggaattgaagattctaatggatgatgttctacctatttcatccgataacatgttaatttccgacaccaacggttttaatatttcgatgatatacggtagtctctctttcggacttatatagcttattccacaatacgagtcattatatactccaaaaaacaaaataactagtataaaatctgtatcgaatgggaaaaacgaaattatcgacataggtatagaatccggaacattgaacgtattaatacttaattctttttctgtggtaagtaccgataggttattgacattgtatggttttaaatattctataacttgagacttgatagatattagtgatgaattgaaaattatttttatcaccacgtgtgtttcaggatcatcgtcgacgcccgtcaaccaaccgaacggagtaaaataaatatcattaatatatgctctagatattagtatttttatcaatcctttgattatcatcttctcgtaggcgaatgattccatgatcaagagtgatttaagaacatcctccggagtattaatgggcttagtaaacagtccatcgttgcaataataaaagttatccaagttaaaggatattatgcattcgtttaaagatatcacctcatctgacggagacaattttttggtaggttttagagactttgaagctacttgtttaacaaagttattcatcgtcgtctactattctatttaattttgtagttaatttatcacatatcacattaattgactttttggtccacttttccatacgtttatattcttttaatcctgcgttatccgtttccgttatatccagggatagatcttgcaagttaaatagaatgctcttaaataatgtcattttcttatccgctaaaaatttaaagaatgtataaacctttttcagagatttgaaactcttaggtggtgtcctagtacacaatatcataaacaaactaataaacattccacattcagattccaacagctgattaacttccacattaatacagcctattttcgctccaaatgtacattcgaaaaatctgaataaaacatcgatgtcacaatttgtattatccaatacagaatgtttgtgattcgtgttaaaaccatcggagaaggaatagaaataaaaattattatagtggtggaattcagttggaatattgcctccggagtcataaaaggatactaaacattgttttttatcataaattacacatttccaatgagacaaataacaaaatccaaacattacaaatctagaggtagaacttttaattttgtctttaagtatatacgataagatatgtttattcataaacgcgtcaaatttttcatgaatcgctaaggagtttaagaatctcatgtcaaattgtcctatataatccacttcggatccataagcaaactgagagactaagttcttaatacttcgattgctcatccaggctcctctctcaggctctattttcatcttgacgacctttggattttcaccagtatgtattcctttacgtgataaatcatcgattttcaaatccatttgtgagaagtctatcgccttagatactttttcccgtagtcgaggtttaaaaaaatacgctaacggtatactagtaggtaactcaaagacatcatatatagaatggtaacgcgtctttaactcgtcggttaactctttcttttgatcgagttcgtcgctactattgggtctgctcaggtgccccgactctactagttccaacatcataccgataggaatacaagacactttgccggcggttgtagatttatcatatttttccactacatatccgttacaatttgttaaaaatttagatacatctatattgctacataatccagctagtgaatatatatgacataataaattggtaaatcctagttctggtattttactaattactaaatctgtatatctttccatttatcatggaaaagaatttaccagatatcttcttttttccaaactgcgttaatgtattctcttacaaatattcacaagatgaattcagtaatatgagtaaaacggaacgtgatagtttctcattggccgtgtttccagttataaaacatagatggcataacgcacacgttgtaaaacataaaggaatatacaaagttagtacagaagcacgtggaaaaaaagtatctcctccatcactaggaaaacccgcacacataaacctaaccgcgaagcaatatatatacagtgaacacacaataagctttgaatgttatagttttctaaaatgtataacaaatacagaaatcaattcgttcgatgagtatatattaagaggactattagaagctggtaatagtttacagatattttccaattccgtaggtaaacgaacagatactataggtgtactagggaataagtatccatttagcaaaattccattggcctcattaactcctaaagcacaacgagagatattttcagcgtggatttctcatagacctgtagttttaactggaggaactggagtgggtaagacgtcacaggtacccaagttattgctttggtttaattatttatttggtggattctctactctagataaaatcactgactttcacgaaagaccagtcattctatctcttcctaggatagctttagttagattgcatagcaataccattttaaaatcattgggatttaaggtactagatggatctcctatttctttacggtacggatctataccggaagaattaataaacaaacaaccaaaaaaatatggaattgtattttctacccataagttatctctaacaaaactatttagttatggcactcttattatagacgaagttcatgagcatgatcaaataggagatattattatagcagtagcgagaaagcatcatacgaaaatagattctatgtttttaatgactgccacgttagaggatgacagggaacggctaaaagtatttttacctaatcccgcatttatacatattcctggagatacactgtttaaaattagcgaggtatttattcataataagataaatccatcttccagaatggcatacatagaagaagaaaagagaaatttagttactgctatacagatgtatactcctcctgatggatcatccggtatagtctttgtggcatccgttgcacagtgtcacgaatataaatcatatttagaaaaaagattaccgtatgatatgtatattattcatggtaaggtcttagatatagacgaaatattagaaaaagtgtattcatcacctaatgtatcgataattatttctactccttatttggaatccagcgttactatacgcaatgttacacacatttatgatatgggtagagtttttgtccccgctccttttggaggatcgcaacaatttatttctaaatctatgagagatcaacgaaaaggaagagtaggaagagttaatcctggtacatacgtctatttctatgatctgtcttatatgaagtctatacagcgaatagattcagaatttctacataattatatattgtacgctaataagtttaatctaacactccccgaagatttgtttataatccctacaaatttggatattctatggcgtacaaaggaatatatagactcgttcgatattagtacagaaacatggaataaattattatccaattattatatgaagatgatagagtatgctaaactttatgtactaagtcctattctcgctgaggagttggataactttgagaggacgggagaattaactagtattgtacgagaagccattttatctctaaatttacaaattaagattttaaattttaaacataaagatgatgatacgtatatacacttttgtaaaatattattcggtgtctataacggaacaaacgctactatatattatcatagacctctaacgggatatatgaatatgatttcagatactatatttgttcctgtagataataactaaaaatcaaactctaatgaccacatctttttttagagatgaaaaattttccacatctccttttgtagacacgactaaacattttgcagaaaaaagtttattagtgtttagataatcgtatacttcatcagtgtagatagtaaatgtgaacagataaaaggtattcttgctcaatagattggtaaattccatagaatatattaatcctttcttcttgagatcccacatcatttcaaccagagacgttttatccaatgatttacctcgtactataccacatacaaaactagattttgcagtgacgtcgtacctggtattcctaccaaacaaaattttacttttagttcttttagaaaattctaaggtagaatctctatttgccaatatgtcatctatggaattaccactagcaaaaaatgatagaaatatatattgatacatcgcagctggttttgatctactatactttaaaaacgaatcagattccataattgcctgtatatcatcagctgaaaaactatgttttacacgtattccttcggcatttctttttaatgatatatcttgtttagacaatgataaagttatcatgtccatgagagacgcgtctccgtatcgtataaatatttcattagatgttagacgcttcattaggggtatacttctataaggtttcttaatcagtccatcattggttgcgtcaagaactactatcggatgttgttgggtatctctagtgttacacatggccttactaaagtttgggtaaataactatgatatctctattaattatagatgcatatatttcattcgtcaaggatattagtatcgacttgctatcgtcattaatacgtgtaatgtaatcatataaatcatgcgatagccaaggaaaatttaaatagatgttcatcatataatcgtcgctataattcatattaatacgttgacattgactaatttgtaatatagcctcgccacgaagaaagctctcgtattcagtttcatcgataaaggataccgttaaatataactggttgccgatagtctcatagtctattaagtggtaagtttcgtacaaatacagaatccctaaaatattatctaatgttggattaatctttaccataactgtataaaatggagacggagtcataactattttaccgtttgtacttactggaatagatgaaggaataatctccggacatgctggtaaagacccaaatgtctgtttgaagaaatccaatgttccaggtcctaatctcttaacaaaaattacgatattcgatcccgatatcctttgcattctatttaccagcatatcacgaactatattaagattatctatcatgtctattctcccaccgttatataaatcgcctccgctaagaaacgttagtatatccatacaatggaatacttcatttctaaaatagtattcgttttctaattctttaatgtgaaatcgtatactagaaagggaaaaattatctttgagttttccgttagaaaagaaccacgaaactaatgttctgattgcgtccgattccgttgctgaattaatggatttacaccaaaaactcatataacttctagatgtagaagcattcgctaaaaaattagtagaatcaaaggatataagtagatgttccaacaagtgagcaattcccaagatttcatctatatcattctcgaatccgaaattagaaattcccaagtagatatcctttttcatccgatcgttgatgaaaatacgaactttattcggtaagacaatcatttactaaggagtaaaataggaagtaatgttcgtatgtcgttatcatcgtataaattaaaggtgtgttttttaccattaagtgacattataattttaccaatattggaattataatataggtgtatttgcgcactcgcgacggttgatgcatcggtaaatatagctgtatctaatgttctagtcggtatttcatcatttcgctgtctaataatagcgttttctctatctgtttccattacagctgcctgaagtttattggtcggataatatgtaaaataataagaaatacatacgaataacaaaaataaaataagatataataaagatgccatttagagatctaattttgtttaacttgtccaaattcctacttacagaagatgaggaatcgttggagatagtgtcttccttatgtagaggatttgaaatatcttataatgacttgataacttactttccagataggaaataccataaatatatttataaagtatttgaacatgtagatttatcggaggaattaagtatggaattccatgatacaactctgagagatttagtctatcttagattgtacaagtattccaagtgtatacggccgtgttataaattaggagataatctaaaaggcatagttgttataaaggacaggaatatttatattagggaagcaaatgatgacttgatagaatatctcctcaaggaatacactcctcagatttatacatattctaatgagcgcgtccccataactggttcaaaattaattctttgtggattttctcaagttacatttatggcgtatacaacgtcgcatataacaacaaataaaaaggtagatgttctcgtttccaaaaaatgtatagatgaactagtcgatccaataaattatcaaatacttcaaaatttatttgataaaggaagcggaacaataaacaaaatactcaggaagatattttattcggtaacaggtggccaaactccataggtagctttttctatttcggattttagaatttccaaattcaccagcgatttatcggttttggtgaaatccaaggatttattaatgtccacaaatgccatttgttttgtctgtggattgtatttgaaaatggaaacgatgtagttagatagatgcgctgcgaagtttcctattagggttccgcgcttcacgtcacccagcatacttgaatcaccatcctttaaaaaaaatgataagatatcaacatggagtatatcatactcgaattttaattcttctactgactcactgacattttcacaaatactacaatacggtttaccgaaaataatcagtacgttcttcatttatgggtatcaaaaacttaaaatcgttactgctggaaaataaatcactgacgatattagatgataatttatacaaagtatacaatggaatatttgtggatacaatgagtatttatatagccgtcgccaattgtgtcagaaacttagaagagttaactacggtattcataaaatacgtaaacggatgggtaaaaaagggagggcatgtaaccctttttatcgatagaggaagtataaaaattaaacaagacgttagagacaagagacgtaaatattctaaattaaccaaggacagaaaaatgttagaattagaaaagtgtacatccgaaatacaaaatgttaccggatttatggaagaagaaataaaggcagaaatgcaattaaaaatcgataaactcacatttcaaatatatttatctgattctgataacataaaaatatcattgaatgagatactaacacatttcaacaataatgagaatgttacattattttattgtgatgaacgagacgcagaattcgttatgtgtctcgaggctaaaacacatttctctaccacaggagaatggccgttgataataagtaccgatcaggatactatgctatttgcatctgctgataatcatcctaagatgataaaaaacttaactcaactgtttaaatttgttccctcggcagaggataactatttagcaaaattaacggcgttagtgaatggatgtgatttctttcctggactctatggggcatctataacacccaccaacttaaacaaaatacaattgtttagtgattttacaatcgataatatagtcactagtttggcaattaaaaattattatagaaagactaactctaccgtagacgtgcgtaatattgttacgtttataaacgattacgctaatttagacgatgtctactcgtatattcctccttgtcaatgcactgttcaagaatttatattttccgcattagatgaaaaatggaatgaatttaaatcatcttatttagaaagcgtgccgttaccctgccaattaatgtacgcgttagaaccacgcaaggagattgatgtttcagaagttaaaactttatcatcttatatagatttcgaaaatactaaatcagatatcgatgttataaaatctatatcctcgatcttcggatattctaacgaaaactgtaacacgatagtattcggcatctataaggataatttactactgagtataaataattcattttactttaacgatagtctgttaataaccaatactaaaagtgataatataataaatataggttactagattaaaaatggtgttccaactcgtgtgctctacatgcggtaaagatatttctcacgaacgatataaattgattatacgaaaaaaatcattaaaggatgtactcgtcagtgtaaagaacgaatgttgtaggttaaaattatctacacaaatagaacctcaacgtaacttaacagtgcaacctctattggatataaactaatatggatccggttaattttatcaagacatatgcgcctagaggttctattatttttattaattataccatgtcattaacaagtcatttgaatccatcgatagaaaaacatgtgggtatttattatggtacgttattatcggaacacttggtagttgaatctacctatagaaaaggagttcgaatagtcccattggatagtttttttgaaggatatcttagtgcaaaagtatacatgttagagaatattcaagttatgaaaatagcagctgatacgtcattaactttattgggtattccgtatggatttggtcatgatagaatgtattgttttaaattggtagctgactgttataaaaatgccggtattgatacatcgtctaaacgaatattgggcaaagatatttttctgagccaaaacttcacagacgataatagatggataaagatatatgattctaataatttaacattttggcaaattgattaccttaaagggtgagttaatatgcataactactcctccgttgttttttccctcgttctttttcttaacgttgtttgccatcactctcataatgtaaagatattctaaaatggtaaacttttgcatatcggacgcagaaattggtataaatgttgtaattgtattatttcccgtcaatggactagtcacagctccatcagttttatatcctttagagtatttctcactcgtgtctaacattctagagcattccatgatctgtttatcgttgatattggccggaaagatagattttttattttttattatattactattggcaattgtagatataacttctggtaaatatttttctaccttttcaatctcttctattttcaagccggctatatattctgctatattgttgctagtatcaataccttttctggctaagaagtcatatgtggtattcactatatcagttttaactggtagttccattagcctttccacttctgcagaataatcagaaattggttctttaccagaaaatccagctactataataggctcaccgatgatcattggcaaaatcctatattgtaccagattaatgagagcatatttcatttccaataattctgctagttcttgagacattgatttatttgatgaatctagttggttctctagatactctaccatttctgccgcatacaataacttgttagataaaatcagggttatcaaagtgtttagcgtggctagaatagtgggcttgcatgtattaaagaatgcggtagtatgagtaaaccgttttaacgaattatatagtctccagaaatctgtggcgttacatacatgagccgaatgacatcgaagattgtccaatatttttaatagctgctctttgtccattatttctatatttgactcgcaacaattgtagataccattaatcaccgattcctttttcgatgccggacaatagcacaattgtttagctttggactctatgtattcagaattaatagatatatctctcaatacagattgcactatacattttgaaactatgtcaaaaattgtagaacgacgctgttctgcagccatttaactttaaataatttacaaaaatttaaaatgagcatccgtataaaaatcgataaactgcgccaaattgtggcatatttttcagagttcagtgaagaagtgtctataaatgtagactcgacggatgagttaatgtatatttttgccgccttgggcggatctgtaaacatttgggcaattatacctctaagtgcatcagtgttttaccgaggagccgaaaatattgtgtttaatcttcctgtgtccaaggtaaaatcgtgtttgtgtagttttcacaatgatgccatcatagatatagaacctgatctggaaaataatctagtaaaactttctagttatcatgtagtaagtgtcgattgtaacaaggaactgatgcctattaggacagatactactatttgtctaagtatagatcaaaagaaatcttacgtgtttaattttcacaagtatgaagaaaaatgttgtggtagaaccgtcattcatctagaatggttgttgggctttatcaagtgtattagtcagcatcagcatctggctattatgtttaaagatgacaatattattatgaagactcctggtaatactgatgcgttttccagggaatattctatgactgaatgttctcaagaactacaaaagttttctttcaaaatagctatctcgtctctcaacaaactacgaggattcaaaaagagagtcaatgtttttgaaactagaatcgtaatggataatgacgataacattttaggaatgttgttttcggatagagttcaatcctttaagatcaacatctttatggcgtttttagattaatactttcaatgagataaatatgggtggcggagtaagtgttgagctccctaaacgggatccgcctccgggagtacccactgatgagatgttattaaacgtggataaaatgcatgacgtgatagctcccgctaagcttttagaatatgtgcatataggaccactagcaaaagataaagaggataaagtaaagaaaagatatccagagtttagattagtcaacacaggacccggtggtctttcggcattgttaagacaatcgtataatggaaccgcacccaattgctgtcgcacttttaatcgtactcattattggaagaaggatggaaagatatcagataagtatgaagagggtgcagtattagaatcgtgttggccagacgttcacgacactggaaaatgcgatgttgatttattcgactggtgtcagggggatacgttcgatagaaacatatgccatcagtggatcggttcagcctttaataggagtaatagaactgtagagggtcaacaatcgttaataaatctgtataataagatgcaaacattatgtagtaaagatgctagtgtaccaatatgcgaatcatttttgcattatttacgcgcacacaatacagaagatagcaaagagatgatcgattatattctaagacaacagtctgcggactttaaacagaaatatatgagatgtagttatcccactagagataagttagaagagtcattaaaatatgcggaacctcgagaatgttgggatccagagtgttcgaatgccaatgttaatttcttactaacacgtaattataataatttaggactttgcaatattgtacgatgtaataccagcgtgaacaacttacagatggataaaacttcctcattaagattgtcatgtggattaagcaatagtgatagattttctactgttcccgtcaatagagcaaaagtagttcaacataatattaaacactcgttcgacctaaaattgcatttgatcagtttattatctctcttggtaatatggatactaattgtagctatttaaatgggtgccgcggcaagcatacagacgacggtgaatacactcagcgaacgtatctcgtctaaattagaacaagaagcgaacgctagtgctcaaacaaaatgtgatatagaaatcggaaatttttatatccgacaaaaccatggatgtaacctcactgttaaaaatatgtgctctgcggacgcggatgctcagttggatgctgtgttatcagccgctacagaaacatatagtggattaacaccggaacaaaaagcatacgtgccagctatgtttactgctgcgttaaacattcagacgagtgtaaacactgttgttagagattttgaaaattatgtgaaacagacttgtaattctagcgcggtcgtcgataacaaattaaagatacaaaacgtaatcatagatgaatgttacggagccccaggatctccaacaaatttggaatttattaatacaggatctagcaaaggaaattgtgccattaaagcgttgatgcaattgacgactaaggccactactcaaatagcacctagacaagttgctggtacaggagttcagttttatatgattgttatcggtgttataatattggcagcgttgtttatgtactatgccaagcgtatgttgttcacatccaccaatgataaaatcaaacttattttagccaataaggaaaacgtccattggactacttacatggacacattctttagaacttctccgatggttattgctaccacggatatgcaaaactgaaaatatattgataatattttaatagattaacatggaagttatcgctgatcgtctagacgatatagtgaaacaaaatatagcggatgaaaaatttgtagattttgttatacacggtctagagcatcaatgtcctgctatacttcgaccattaattaggttgtttattgatatactattatttgttatagtaatttatatttttacggtacgtctagtaagtagaaattatcaaatgttgttggtggtgctagtcatcacattaactattttttattactttatactataatagtactagactgacttctaacaaacatctcacctgccataaataaatgcttgatattaaagtcttctatttctaacactattccatctgtggaaaataatactctgacattatcgctaattgacacatcggtgagtgatatgcctataaagtaataatcttctttgggcacatataccagtgtaccaggttctaacaacctatttactggtgctcctgtagcatactttttctttaccttgagaatatccatcgtttgcttggtcaatagcgatatgtgattttttatcaaccactcaaaaaagtaattggagtgttcatatcctctacgggctattgtctcatggccgtgtatgaaatttaagtaacacgactgtggtagatttgttctatagagccgattgccgcaaatagatagaactaccaatatgtctgtacaaatgttaaacattaattgattaacagaaaaaacaatgttcgttctgggaatagaaaccagatcaaaacaaaattcgttagaatatatgccacgtttatacatggaatataaaataactacagtttgaaaaataacagtatcatttaaacatttaacttgcggggttaatctcacaactttactgtttttgaactgttcaaaatatagcatcgatccgtgagaaatacgtttagccgcctttaatagaggaaatcccaccgcctttctggatctcaccaacgacgatagttctgaccagcaactcatttcttcatcatccacctgttttaacatataataggcaggagatagatatccgtcattgcaatattccttctcgtaggcacacaatctaatattgataaaatctccattctcttctctgcatttattatcttgtctcggtggctgattaggctgtggtcttggtttaggccttggtctatcgttgttgaatctattttggtcattaaatctttcatttcttcctggtatatttctatcacctcgtttggttggatttttgtctatattatcgtttgtaacatcggtacgggtattcatttatcacaaaaaaaacttctctaaatgagtctactgctagaaaacctcatcgaagaagataccatattttttgcaggaagtatatctgagtatgatgatttacaaatggttattgccggcgcaaaatccaaatttccaagatctatgctttctatttttaatatagtacctagaacgatgtcaaaatatgagttggagttgattcataacgaaaatatcacaggagcaatgtttaccacaatgtataatataagaaacaatttgggtctaggagatgataaactaactattgaagccattgaaaactatttcttggatcctaacaatgaagttatgcctcttattattaataatacggatatgactgccgtcattcctaaaaaaagtggtaggagaaagaataagaacatggttatcttccgtcaaggatcatcacctatcttgtgcattttcgaaactcgtaaaaagattaatatttataaagaaaatatggaatccgcgtcgactgagtatacacctatcggagacaacaaggctttgatatctaaatatgcgggaattaatgtcctgaatgtgtattctccttccacatccataagattgaatgccatttacggattcaccaataaaaataaactagagaaacttagtactaataaggaactagaatcgtatagttctagccctcttcaagaacccattaggttaaatgattttctgggactattggaatgtgttaaaaagaatattcctctaacagatattccgacaaaggattgattactataaatggagaatgttcctaatgtatactttaatcctgtgtttatagagcccacgtttaaacattctttattaagtgtttataaacacagattaatagttttatttgaagtattcgttgtattcattctaatatatgtattttttagatctgaattaaatatgttcttcatgcctaaacgaaaaatacccgatcctattgatagattacgacgtgctaatctagcgtgtgaagacgataaattaatgatctatggattaccatggatgacaactcaaacatctgcgttatcaataaatagtaaaccgatagtgtataaagattgtgcaaagcttttgcgatcaataaatggatcacaaccagtatctcttaacgatgttcttcgcagatgatgattcattttttaagtatttggctagtcaagatgatgaatcttcattatctgatatattgcaaatcactcaatatctagactttctgttattattattgatccaatcaaaaaataaattagaagctgtgggtcattgttatgaatctctttcagaggaatacagacaattgacaaaattcacagactttcaagattttaaaaaactgtttaacaaggtccctattgttacagatggaagggtcaaacttaataaaggatatttgttcgactttgtgattagtttgatgcgattcaaaaaagaatcctctctagctaccaccgcaatagatcctgttagatacatagatcctcgtcgtgatatcgcattttctaacgtgatggatatattaaagtcgaataaagtgaacaataattaattctttattgtcatcatgaacggcggacatattcagttgataatcggccccatgttttcaggtaaaagtacagaattaattagacgagttagacgttatcaaatagctcaatataaatgcgtgactataaaatattctaacgataatagatacggaacgggactatggacgcatgataagaataattttgaagcattggaagcaactaaactatgtgatgtcttggaatcaattacagatttctccgtgataggtatcgatgaaggacagttctttccagacattgtttaattctgtgagcgtatggcaaacgaaggaaaaatagttatagtagccgcactcgatgggacatttcaacgtaaaccgtttaataatattttgaatcttattccattatctgaaatggtggtaaaactaactgctgtgtgtatgaaatgctttaaggaggcttccttttctaaacgattgggtgaggaaaccgagatagagataataggaggtaatgatatgtatcaatcggtgtgtagaaagtgttacgtcggctcataatattatattttttatctaaaaaactaaaaataaacattgattaaattttaatataatacttaaaaatggatgttgtgtcgttagataaaccgtttatgtattttgaggaaattgataatgagttagattacgaaccagaaagtgcaaatgaggtcgcaaaaaaactgccgtatcaaggacagttaaaactattactaggagaattattttttcttagtaagttacagcgacacggtatattagatggtgccaccgtagtgtatataggatcggctcctggtacacatatacgttatttgagagatcatttctataatttaggagtgatcatcaaatggatgctaattgacggccgccatcatgatcctattttaaatggattgcgtgatgtaactctagtgactcggttcgttgatgaggaatatctacgatccatcaaaaaacaactgcatccttctaagattattttaatttctgatgtaagatccaaacgaggaggaaatgaacctagtacggcggatttactaagtaattacgctctacaaaatgtcatgattagtattttaaaccccgtggcgtctagtcttaaatggagatgcccgtttccagatcaatggatcaaggacttttatatcccacacggtaataaaatgttacaaccttttgctccttcatattcagctgaaatgagattattaagtatttataccggtgagaacatgagactgactcgagttaccaaattagacgctgtaaattatgaaaaaaagatgtactaccttaataagatcgtccgtaacaaagtagttgttaactttgattatcctaatcaggaatatgactattttcacatgtactttatgctgaggaccgtgtactgcaataaaacatttcctactactaaagcaaaggtactatttctacaacaatctatatttcgtttcttaaatattccaacaacatcaactgaaaaagttagtcatgaaccaatacaacgtaaaatatctagcaaaaattctatgtctaaaaacagaaatagcaagagatccgtacgcggtaataaatagaaacgtactactgagatatactaccgatatagagtataatgatttagttactttaataaccgttagacataaaattgattctatgaaaactgtgtttcaggtatttaacgaatcatccataaattatactccggttgatgatgattatggagaaccaatcattataacatcgtatcttcaaaaaggtcataacaagtttcctgtaaattttctatacatagatgtggtaatatctgacttatttcctagctttgttagactagatactacagaaactaatatagttaatagtgtactacaaacaggcgatggtaaaaagactcttcgtcttcccaaaatgttagagacggaaatagttgtcaagattctctatcgccctaatataccattaaaaattgttagatttttccgcaataacatggtaactggagtagagatagccgatagatctgttatttcagtcgctgattaatcaattagtagagatgagataagaacattataataatcaataatatatcttatatcttatatcttatatcttatatcttgtttagaaaaatgctaatattaaaatagctaacgctagtaatccaatcggaagccatttgatatctataatagggtatctaatttcctgatttaaatagcggacagctatattctcggtagctactcgtttggaatcacaaacattatttacatctaatttactatctgtaatggaaacgtttcccaatgaaatggtacaatccgatacattgcattttgttatatttttttttaaagaggctggtaacaacgcatcgcttcgtttacatggctcgtaccaacaataatagggtaatcttgtatctattcctatccgtactatgcttttatcaggataaatacatttacatcgtatatcgtctttgttagcatcacagaatgcataaatttgttcgtccgtcatgataaaaatttaaagtgtaaatataactattatttttatagttgtaataaaaagggaaatttgattgtatactttcggttctttaaaagaaactgacttgataaaaatggctgtaatctctaaggttacgtatagtctatatgatcaaaaagagattaatgctacagatattatcattagtcatgttaaaaatgacgacgatatcggtaccgttaaagatggtagactaggtgctatggatggggcattatgtaagacttgtgggaaaacggaattggaatgtttcggtcactggggtaaagtaagtatttataaaactcatatagttaagcctgaatttatttcagaaattattcgtttactgaatcatatatgtattcactgcggattattgcgttcacgagaaccgtattccgacgatattaacctaaaagagttatcgggacacgctcttaggagattaaaggataaaatattatccaagaaaaagtcatgttggaacagtgaatgtatgcaaccgtatcaaaaaattactttttcaaagaaaaaggtttgtttcgtcaacaagttggatgatattaacgttcctaattctctcatctatcaaaagttaatttctattcatgaaaagttttggccattattagaaattcatcaatatccagctaacttattttatacagactactttcccatccctccgttgattattagaccggctattagtttttggatagatagtatacccaaagagaccaatgaattaacttacttattaggtatgatcgttaagaattgtaacttgaatgctgatgaacaggttatccagaaggcggtaatagaatacgatgatattaaaattatttctaataacactaccagtatcaatttatcatatattacatccggcaaaaataatatgattagaagttatatcgtcgcccgacgaaaagatcagaccgctagatctgtaattggtcccagtacatctatcaccgttaatgaggtaggaatgcccgcatatattagaaatacacttacagaaaagatatttgttaatgcctttacagtggataaagttaaacaactattagcgtcaaaccaagttaaattttactttaataaacgattaaaccaattaacaagaatacgccaaggaaagtttattaaaaataaaatacatttattgcctggtgattgggtagaagtagctgttcaagaatatacaagtattatttttggaagacagccgtctctacatagatacaacgtcatcgcttcatctatcagagctaccgaaggagatactatcaaaatatctcccggaattgccaactctcaaaatgctgatttcgacggggatgaggaatggatgatattagaacaaaatcctaaagctgtaattgaacaaagtattcttatgtatccgacgacgttactcaaacacgatattcatggagcccccgtttatggatctattcaagatgaaatcgtagcagcgtattcattgtttaggatacaagatctttgtttagatgaagtattgaacatcttggggaaatatggaagagagttcgatcctaaaggtaaatgtaaattcagcggtaaagatatctatacttacttgataggtgaaaagattaattatccgggtctcttaaaggatggtgaaattattgcaaacgacgtagatagtaattttgttgtggctatgaggcatctgtcattggctggactcttatccgatcataagtcgaacgtggaaggtatcaactttattatcaagtcatcttatgtttttaagagatatctatctatttacggttttggggtgacattcaaagatctgagaccaaattcgacgttcactaataaattggaggccatcaacgtagaaaaaatagaacttatcaaagaagcatacgccaaatatctcaacgatgtaagagacgggaaaatagttccattatctaaagctttagaggcggactatgtggaatccatgttatccaacttgacaaatcttaatatccgagagatagaagaacatatgagacaaacgctgatagatgatccagataataacctcctgaaaatggccaaagcgggttataaagtaaatcccacagaactaatgtatattctaggtacgtatggacaacaaaggattgatggtgaaccagcagagactcgagtattgggtagagttttaccttactatcttccagactctaaggatccagaaggaagaggttacattcttaattctttaacaaaaggattaacgggttctcaatattacttttcgatgctggttgccagatctcaatctactgatatcgtctgtgaaacatcacgtaccggaacactggctagaaaaatcattaaaaagatggaggatatggtggtcgacggatacggacaagtagttataggtaatacgctcatcaagtacgccgccaattataccaaaattctaggctcagtatgtaaacctgtagatcttatctatccagatgagtccatgacttggtatttggaaattagtgctctgtggaataaaataaaacagggattcgtttactctcagaaacagaaacttgcaaagaagacattggcgccgtttaatttcctagtattcgtcaaacccaccactgaggataatgctattaaggttaaggatctgtacgatatgattcataacgtcattgatgatgtgagagagaaatacttctttacggtatctaatatagattttatggagtatatattcttgacgcatcttaatccttctagaattagaattacaaaagaaacggctatcactatctttgaaaagttctatgaaaaactcaattatactctaggtggtggaactcctattggaattatttctgcacaggtattgtctgagaagtttacacaacaagccctgtccagttttcacactactgaaaaaagtggtgccgtcaaacaaaaacttggtttcaacgagtttaataacttgactaatttgagtaagaataagaccgaaattatcactctggtatccgatgatatctctaaacttcaatctgttaagattaatttcgaatttgtatgtttgggagaattaaatccaaacatcactcttcgaaaagaaacagataaatatgtagtagatataatagtcaatagattatacatcaagagagcagaaataaccgaattagtcgtcgaatatatgattgaacgatttatctcctttagcgtcattgtaaaggaatggggtatggagacattcattgaggacgaggataatattagatttactgtctacctaaatttcgttgaaccggaagaattgaatcttagtaagtttatgatggttcttccgggggcagccaacaagggaaagattagtaaattcaagattcctatctctgattatacgggatatgacgacttcaatcaaacaaaaaagctcaataagatgactgtagaactcatgaatctaaaagaattgggttctttcgatttggaaaacgtcaacgtgtatcctggagtatggaatacatacgatatcttcggtatcgaggccgctcgtgaatacttgtgcgaagccatgttaaacacctatggagaagggttcgattatctgtatcagccttgtgatcttctcgctagtttactatgtgctagttacgaaccagaatcagtgaataaattcaagttcggcgcagctagtactcttaagagagctacgttcggagacaataaagcattgttaaacgcggctcttcataaaaagtcagaacctattaacgataatagtagctgccacttttttagcaaggtccctaatataggaactggatattacaaatactttatcgacttgggtcttctcatgagaatggaaaggaaactatctgataagatatcttctcaaaagatcaaggaaatggaagaaacagaagacttttaattcttatcaataacatatttttctatgatctgtcttttaaacgatggattttccacaaatgcgcctctcaagtccctcatagaatgatacacgtataaaaaatatagcataggcaatgactccttatttttagacattagatatgccaaaatcatagccccgcttctatttactcccgcagcacaatgaaccaacacgggctcgtttcgttgatcacatttagataaaaaggcggttacgtcgtcaaaatatttactaatatcggtagttgtatcatctaccaacggtatatgaataatattaatattagagttaggtaatgtatatttatccatcgtcaaatttaaaacatatttgaacttaacttcagatgatggtgcatccatagcatttttataatttcccaaatacacattattggttacccttgtcattatagtgggagatttggctttgtgcatatctccagttgaacgtagtagtaagtatttatacaaacttttcttatccatttataacgtacaaatggataaaactactttatcggtaaacgcgtgtaatttagaatacgttagagaaaaggctatagtaggcgtacaagcagccaaaacatcaacacttatattctttgttattatattggcaattagtgcgctattactctggtttcagacgtctgataatccagtctttaatgaattaacgagatatatgcgaattaaaaatacggttaacgattggaaatcattaacggatagcaaaacaaaattagaaagtgatagaggtagacttctagccgctggtaaggatgatatatttgaattcaaatgtgtggatttcggcgcctattttatagctatgcgattggataagaaaacatatctgccgcaagctattaggcgaggtactggagacgcgtggatggttaaaaaggcggcaaaggtcgatccatctgctcaacaattttgtcagtatttgataaaacacaagtctaataatgttattacttgtggtaatgagatgttaaatgaattaggttatagcggttattttatgtcaccgcattggtgttccgattttagtaatatggaatagtgttagataaatgcggtaacgaatgttcctgtaaggaaccataacagcttagatttaacgttaaagatgagcataaacataataaacaaaattacaatcaaacttataacattaatatcaaacaatccaaaaaatgaaatcagtggagtagtaaacgcgtacataactcctggataacgtttagcagctgccgttcctattctagaccaaaaattcggtttcatgttttcgaaacggtattctgcaacaagtcgaggatcgtgttctacatatttggcggcattatccagtatctgcctattgatcttcatttcgttttcgattctggctatttcaaaataaaatcccgatgatagacctccagactttataatttcatctacgatgttcagcgccgtagtaactctaataatataggctgataagctaacatcataccctcctgtatatgtgaatatggcatgatttttgtccattacaagctcggttttaactttattgcctgtaataatttctctcatctgtaggatatctatttttttgtcatgcattgccttcaagacgggacgaagaaacgtaatatcctcaataacgttatcgttttctacaataactacatattctacctttttattttctaactcggtaaaaaaattagaatcccatagggctaaatgtctagcgatatttcttttcgtttcctctgtacacatagtgttacaaaaccctgaaaagaagtgagtatacttgtcatcatttctaatgtttcctccagtccactgtataaacgcataatccttgtaatgatctggatcatccttgactaccacaacatttcttttttctggcataacttcgttgtcctttacatcatcgaacttctgatcattaatatgctcatgaacattaggaaatgtttctgatggaggtctatcaataactggcacaacaataacaggagttttcaccgccgccatttagttattgaaattaatcatatacaactctttaatacgagttatattttcgtctatccattgtttcacattgacatatttcgacaaaaagatataaaatgcgtattccaatgcttctctgtttaatgaattactaaaatatacaaacacgtcactgtctggcaataaatgatatcttagaatattgtaacaatttattttgtattgcacatgttcgtgatctatgagttcttcttcgaatggcataggatctccgaatctgaaaacgtataaataggagttagaataataatatttgagagtattggtaatatataaactctttagcggtataattagtttttttctctcaatttctatttttagatgtgatggaaaaatgactaattttgtagcattagtatcatgaactctaatcaaaatcttaatatcttcgtcacacgttagctctttgaagtttttaagagatgcatcagttggttctacagatggagtaggtgcaacaattttttgttctacacatgtatgtactggagccattgttttaactataatggtgcttgtatcgaaaaactttaatgcagatagcggaagctcttcgccgcgactttctacgtcgtaattgggttctaacgccgatctctgaatggatactagttttctaagttctaatgtgattctctgaaaatgtaaatccaattcctccggcattatagatgtgtatacatcggtaaataaaactatagtatccaacgatcccttctcgcaaattctagtcttaaccaaaaaatcgtatataaccacggagatggcgtatttaagagtggattcttctaccgttttgttcttggatgtcatataggaaactataaagtccgcactactgttaagaatgattactaacgcaactatatagtttaaattaagcattttggaaacataaaataactctgtagacgatacttgactttcgaataagtttgcagacaaacgaagaaagaacagacctctcttaatttcagaagaaaactttttttcgtattcctgacgtctagagtttatatcaataagaaagttaagaattagtcggttaatgttgtatttcattacccaagtttgagatttcataatattatcaaaagacatgataatattaaagataaagcgctgactatgaacgaaatagctatatggttcgctcaagaatatagtcttgttaaacgtggaaacgataactgtatttttaatcacgtcagcggcatctaaattaaatataggtatatttattccacacactctacaatatgccacaccatcttcataataaataaattcgttagcaaaattattaattttagtgaaatagttagcgtcaactttcatagcttccttcaatctaatttgatgctcacacggtgcgaattccactctaacatcccttttccatgcctcaggttcatcgatctctataatatctagttttttgcgtttcacaaacacaggctcgtctctcgcgatgagatctgtatagtaactatgtaaatgataactagatagaaagatgtagctatatagatgacgatcctttaagagaggtataataactttaccccaatcagatagactgttgttatggtcttcggaaaaagaatttttataaatttttccagtattttccaaatatacgtacttaacatctaaaaaatccttaatgataataggaatggataatccgtctattttataaagaaatacatatcgcacattatacttttttttggaaatgggaataccgatgtgtctacataaatatgcaaagtctaaatattttttagagaatcttagttggtccaaattcttttccaagtacggtaatagatttttcatattgaacggtatcttcttaatctctggttctagttccgcattaaatgatgaaactaagtcactatttttataactaacgattacatcacctctaacatcatcatttaccagaatactgatcttcttttgtcgtaaatacatgtctaatgtgttaaaaaaaagatcatacaagttatacgtcatttcatctgtggtattcttgtcattgaaggataaactcgtactaatctcttctttaacagcctgttcaaatttatatcctatatacgaaaaaatagcaaccagtgtttgatcatccgcgtcaatattctgttctatcgtagtgtataacaatcgtatatcttcttctgtgatagtcgatacgttataaaggttgataacgaaaatatttttatttcgtgaaataaagtcatcgtaggattttggacttatattcgcgtctagtagatatgcttttatttttggaatgatctcaattagaatagtctctttagagtccatttaaagttacaaacaactaggaaattggtttatgatgtataatttttttagtttttatagattctttattctatacttaaaaaatgaaaataaatacaaaggttcttgagggttgtgttaaattgaaagcgagaaataatcataaattatttcattatcgcgatatccgttaagtttgtatcgtaatggcgtggtcaattacgaataaagcggatactagtagcttcacaaagatggctgaaatcagagctcatctaaaaaatagcgctgaaaataaagataaaaacgaggatattttcccggaagatgtaataattccatctactaagcccaaaaccaaacgagccactactcctcgtaaaccagcggctactaaaagatcaaccaaaaaggaggaagtggaagaagaagtagttatagaggaatatcatcaaacaactgaaaaaaattctccatctcctggagtcagcgacattgtagaaagcgtggccgctgtagagctcgatgatagcgacggggatgatgaacctatggtacaagttgaagctggtaaagtaaatcatagtgctagaagcgatctctctgacctaaaggtggctaccgacaatatcgttaaagatcttaagaaaattattactagaatctctgcagtatcgacggttctagaggatgttcaagcagctggtatctctagacaatttacttctatgactaaagctattacaacactatctgatctagtcaccgagggaaaatctaaagttgttcgtaaaaaagttaaaacttgtaagaagtaaatgcgtgcacttttttataaagatggtaaactctttaccgataataattttttaaatcctgtatcagacgataatccagcgtatgaggttttgcaacatgttaaaattcctactcatttaacagatgtagtagtatatgaacaaacgtgggaggaggcgttaactagattaatttttgtgggaagtgattcaaaaggacgtagacaatacttttacggaaaaatgcatgtacagaatcgcaacgctaaaagagatcgtatttttgttagagtatataacgttatgaaacgaattaattgttttataaacaaaaatataaagaaatcgtccacagattccaattatcagttggcggtttttatgttaatggaaactatgttttttattagatttggtaaaatgaaatatcttaaggagaatgaaacagtagggttattaacactaaaaaataaacacatagaaataagtcccgatgaaatagttatcaagtttgtaggaaaggacaaagtttcacatgaatttgttgttcataagtctaatagactatataaaccgctattgaaactgacggatgattctagtcccgaagaatttctgttcaacaaactaagtgaacgaaaggtatacgaatgtatcaaacagtttggtattagaatcaaggatctccgaacgtatggagtcaattatacgtttttatataatttttggacaaatgtaaagtccatatctcctcttccgtcaccaaaaaagttaatagcattaactatcaaacaaactgctgaagtggtaggtcatactccatcaatttcaaaaagagcttatatggcaacgactattttagaaatggtaaaggataaaaattttttagatgtagtatctaaaactacgttcgatgaattcctatctatagtcgtagatcacgttaaatcatctacggatggatgatatagatctttacacaaataattacaagaccgataaatggaaatggataagcgtatgaaatctctcgcaatgacagctttcttcggagagctaagcacattagatattatggcattgataatgtctatatttaaacgccatccaaacaataccattttttcagtggataaggatggtcagtttatgattgatttcgaatacgataattataaggcttctcaatatttggatctgaccctcactccgatatctggagatgaatgcaagactcacgcatcgagtatagccgaacaattggcgtgtgcggatattattaaagaggatattagcgaatatatcaaaactactccccgtcttaaacgatttataaaaaaataccgcaatagatcagatactcgtatcagtcgagatacagaaaagcttaaaatagctctagctaaaggcatagattacgaatatataaaagacgcttgttaataagtaaatgaaaaaaaactagtcgtttataataaaacacgatatggatgccaacgtagtatcattttctactattgcgacgtatatagacgctttagcgaagaatgcttcggaattagaacagaggtctaccgcatacgaaataaataatgaattggaactagtatttattaagccgccattgattactttgacaaatgtagtgaatatctctacgattcaggaatcgtttattcgatttaccgttactaataaggaaggtgttaaaattagaactaagattccattatctaaggtacatggtctagatgtaaaaaatgtacagttagtagatgctatagataacatagtttgggaaaagaaatcattagtgacggaaaatcgtcttcacaaagaatgcttgttgagactatcgacagaggaacgtcatatatttttggattacaagaaatatggatcctctatccgactagaattagtcaatcttattcaagcaaaaacaaaaaactttacgatagactttaagctaaaatattttctaggatccggtgcccagtctaaaagttctttgttgcacgctattaatcatccaaagtcaaggcctaatacatctctggaaatagaattcacacctagagacaatgaaacagttccatatgatgaactaataaaggaattgacgactctctcgcgtcatatatttatggcttctccagagaatgtaattctttctccgcctattaacgcgcctataaaaacctttatgttgcctaaacaagatatagtaggtttggatctggaaaatctatatgccgtaactaagactgacggcattcctataactatcagagttacatcaaacgggttgtattgttattttacacatcttggttatattattagatatcctgttaagagaataatagattccgaagtagtagtctttggtgaggcagttaaggataagaactggaccgtatatctcattaagctaatagagcctgtgaatgcaatcaatgatagactagaagaaagtaagtatgttgaatctaaactagtggatatttgtgatcggatagtattcaagtcaaagaaatacgaaggtccgtttactacaactagtgaagtcgtcgatatgttatctacatatttaccaaagcaaccagaaggtgttattctgttctattcaaagggacctaaatctaacattgattttaaaattaaaaaggaaaatactatagaccaaactgcaaatgtagtatttaggtacatgtccagtgaaccaattatctttggagaatcgtctatctttgtagagtataagaaatttagcaacgataaaggctttcctaaagaatatggttctggtaagattgtgttatataacggcgttaattatctaaataatatctattgtttggaatatattaatacacataatgaagtgggtattaagtccgtggttgtacctattaagtttatagcagaattcttagttaatggagaaatacttaaacctagaattgataaaaccatgaaatatattaactcagaagattattatggaaatcaacataatatcatagtcgaacatttaagagatcaaagcatcaaaataggagatatctttaacgaggataaactatcggatgtgggacatcaatacgccaataatgataaatttagattaaatccagaagttagttattttacgaataaacgaactagaggaccgttgggaattttatcaaactacgtcaagactcttcttatttctatgtattgttccaaaacatttttagacgattccaacaaacgaaaggtattggcgattgattttggaaacggtgctgacctggaaaaatacttttatggagagattgcgttattggtagcgacggatccggatgctgatgctatagctagaggaaatgaaagatacaacaaattaaactctggaattaaaaccaagtactacaaatttgactacattcaggaaactattcgatccgatacatttgtctctagtgtcagagaagtattctattttggaaagtttaatatcatcgactggcagtttgctatccattattcttttcatccgagacattatgctaccgtcatgaataacttatccgaactaactgcttctggaggcaaggtattaatcactaccatggacggagacaaattatcaaaattaacagataaaaagacttttataattcataagaatttacctagtagcgaaaactatatgtctgtagaaaaaatagctgatgatagaatagtggtatataatccatcaacaatgtctactccaatgactgaatacattatcaaaaagaacgatatagtcagagtgtttaacgaatacggatttgttcttgtagataacgttgatttcgctacaattatagaacgaagtaaaaagtttattaatggcgcatctacaatggaagatagaccgtctacaaaaaactttttcgaactaaatagaggagccattaaatgtgaaggtttagatgtcgaagacttacttagttactatgttgtttatgtcttttctaagcggtaaataataatatggtatgggttctgatctcccagttctaaatgcattaaataattccaatagagcgatttttgttcctataggaccttccaactgtggatactctgtattgttaatagatatattaatacttttgtcgggtaacagaggttctacgtcttctaaaaataaaagttttataacatctggcctgttcataaataaaaacttggcgattctatatatactcttattatcaaatctagccattgtcttatagatgtgagctactgtaggtgtaccatttgattttctttctaatactatatatttctctcgaagaagttcttgcacatcatctgggaataaaatactactgttgagtaaatcagttattttttttatatcgatattgatggacatttttatagttaaggataataagtatcccaaagtcgataacgacgataacgaagtatttatacttttaggaaatcacaatgactttatcagattaaaattaacaaaattaaaggagcatgtatttttttctgaatatattgtgactccagatacatatggatctttatgcgtcgaattaaatgggtctagttttcagcacggcggtagatatatagaggtggaggaatttatagatgctggaagacaagttagatggtgttctacatccaatcatatatctaaagatatacccgaagatatgcacactgataaatttgtcatttatgatatttatacgtttgattcgttcaagaataaacgattggtattcgtacaggtacctccgtcgttaggagatgatagtcatttgactaatccgttattgtcaccgtattatcgtaattcagtagccagacaaatggtcaatgatatgatttttaatcaagattcatttttaaaatatttattagaacatctgattagaagccactatagagtttctaaacatataacaatagttagatacaaggataccgaagaattaaatctaacgagaatatgttataatagagataagtttaaggcgtttgtattcgcttggtttaacggcgtttcggaaaatgaaaaggtactagatacgtataaaaaggtatctaatttgatataatgaattcagtgactgtatcacacgcgccatatactattacttatcacgatgattgggaaccagtaatgagtcaattggtagagttttataacgaagtagccagttggctgctacgagacgagacgtcgcctattcctgataagttctttatacagttgaaacaaccgcttagaaataaacgagtatgtgtgtgtggtatagatccgtatccgaaagatggaactggtgtaccgttcgaatcaccaaattttacaaaaaaatcaattaaggagatagcttcatctatatctagattaaccggagtaattgattataaaggttataaccttaatataatagacggggttataccctggaattattacttaagttgtaaattaggagaaacaaaaagtcacgcgatttactgggataagatttccaagttactgctgcagcatataactaaacacgttagtgttctttattgtttgggtaaaacagatttctcgaatatacgggccaagttagaatccccggtaactaccatagtcggatatcatccagcggctagagaccgccaattcgagaaagatagatcatttgaaattatcaacgttttactggaattagacaacaaggcacctataaattgggctcaagggtttatttattaatgctttagtgaaattttaacttgtgttctaaatggatgcggctattagaggtaatgatgttatctttgttcttaagactataggtgtcccgtcagcgtgcagacaaaatgaagatccaagatttgtagaagcatttaaatgcgacgagttagaaagatatattgagaataatccagaatgtacactattcgaaagtcttagggatgaggaagcatactctatagtcagaattttcatggatgtagatttagacgcgtgtctagacgaaatagattatttaacggccattcaagattttattatcgaggtgtcaaactgtgtagctagattcgcgtttacagaatgcggcgccattcatgaaaatgtaataaaatccatgagatctaatttttcattgactaagtctacaaatagagataaaacaagttttcatattatctttttagatacgtataccactatggatacattgatagctatgaaacgaacactattagaattaagtagatcatctgaaaatccactaaccagatcgatagacactgccgtatataggagaaaaacaactcttcgggttgtaggtactaggaaaaatccaaattgcgacactattcatgtaatgcaaccaccgcatgataatatagaagattacctattcacttacgtggatatgaacaacaatagttattacttttctctacaacaacgattggaggatttagttcctgataagttatgggaaccagggtttatttcattcgaagacgctataaaaagagtttcaaaaatattcattaattctataataaactttaatgatctcgatgaaaataattttacaacggtaccactggtcatagattacgtaacaccttgtgcattatgtaaaaaacgatcgcataaacatccgcatcaactatcgttggaaaatggtgctattagaatttacaaaactggtaatccacatagttgtaaagttaaaattgttccgttggatggtaataaactgtttaatattgcacaaagaattttagacactaactctgttttattaaccgaacgaggagaccatatagtttggattaataattcatggaaatttaacagcgaagaacccttgataacaaaactaattttgtcaataagacatcaactacctaaggaatattcaagcgaattactctgtccaagaaaacgaaagactgtagaagctaacatacgagacatgttagtagattcagtggagaccgatacctatccggataaacttccgtttaaaaatggtgtattggacctggtagacggaatgttttactctggagatgatgctaaaaaatatacgtgtactgtatcaaccggatttaaatttgacgatacaaagttcgtcgaagacagtccagaaatggaagagttaatgaatatcattaacgatatccaaccattaacggatgaaaataagaaaaatagagagctatatgaaaaaacattatctagttgtttatgcggtgctaccaaaggatgtttaacattcttttttggagaaactgcaactggaaagtcgacaaccaaacgtttgttaaagtctgctatcggtgacctgtttgttgagacgggtcaaacaattttaacagatgtattggataaaggacctaatccatttatcgctaacatgcatttgaaaagatctgtattctgtagcgaactacctgattttgcctgtagtggatcaaagaaaattagatctgacaatattaaaaagttgacagaaccttgtgtcattggaagaccgtgtttctccaataaaattaataatagaaaccatgcgacaatcattatcgatactaattacaaacctgtttttgataggatagataacgcattaatgagaagaattgccgtcgtgcgattcagaacacacttttctcaaccttctggtagagaggctgctgaaaataatgacgcgtacgataaagtcaaactattagacgaggggttagatggtaaaatacaaaataatatatatagatttgcatttctatacttgttggtgaaatggtacaaaaaatatcatgttcctattatgaaactatatcctacacccgaagagattcctgactttgcattctatctcaaaataggtactctgttggtatctagctctgtaaagcatattccattaatgacggacctctccaaaaagggatatatattgtacgataatgtggtcactcttccgttgactactttccaacagaaaatatccaagtattttaattctagactatttggacacgatatagagagcttcatcaatagacataagaaatttgccaatgttagtgatgaatatctgcaatatatattcatagaggatatttcatctccgtaaatatatgctcatatatttatagaagatatcacatatctaaatgaataccggaatcatagatttatttgataatcatgttgatagtataccaactatattacctcatcagttagctactctagattatctagttagaactatcatagatgagaacagaagcgtgttattgttccatattatgggatcaggtaaaacaataatcgctttgttgttcgccttggtagcttccagatttaaaaaggtttacattctagtgccgaacatcaacatcttaaaaattttcaattataatatgggtgtagctatgaacttgtttaatgacgaattcatagctgagaatatctttattcattccacaacaagtttttattctcttaattataacgataacgtcattaattataacggattatctcgctacaataactctatttttatcgttgatgaggcacataatatctttgggaataatactggagaacttatgaccgtgataaaaaataaaaacaagattccttttttactattgtctggatctcccattactaacacacctaatactctgggtcatattatagatttaatgtccgaagagacgatagattttggtgaaattattagtcgtggtaagaaagtaattcagacacttcttaacgaacgcggtgtgaatgtacttaaggatttgcttaaaggaagaatatcatattacgaaatgcctgataaagatctaccaacgataagatatcacggacgtaagtttctagatactagagtagtatattgtcacatgtctaaacttcaagagagagattatatgattactagacgacagctatgttatcatgaaatgtttgataaaaatatgtataacgtgtcaatggcagtattgggacaacttaatctgatgaataatttagatactttatttcaggaacaggataaggaattgtacccaaatctgaaaataaataatggcgtgttatacggagaagaattggtaacgttaaacattagttccaaatttaaatactttattaatcggatacagacactcaacggaaaacattttatatacttttctaattctacatatggcggattggtaattaaatatatcatgctcagtaatggatattctgaatataatggttctcagggaactaatccacatatgataaacggcaaaccaaaaacatttgctatcgttactagtaaaatgaaatcgtctttagaggatctattagatgtgtataattctcctgaaaacgatgatggtagtcaattgatgtttttgttttcatcaaacattatgtccgaatcctatactctaaaagaggtaaggcatatttggtttatgactatcccagatactttttctcaatacaaccaaattcttggacgatctattagaaaattctcttacgccgatatttctgaaccagttaatgtatatcttttagccgccgtatattccgatttcaatgacgaagtgacgtcattaaacgattacacacaggatgaattaattaatgttttaccatttgacatcaaaaagctgttgtatctaaaatttaagacgaaagaaacgaatagaatatactctattcttcaagagatgtctgaaacgtattctcttccaccacatccatcaattgtaaaagttttattgggagaattggtcagacaatttttttataataattctcgtattaagtataacgataccaagttacttaaaatggttacatcagttataaaaaataaagaagacgctaggaattacatagatgatattgtaaacggtcacttctttgtatcgaataaagtatttgataaatctcttttatacaaatacgaaaacgatattattacagtaccgtttagactttcctacgaaccatttgtttggggagttaactttcgtaaagaatataacgtggtatcttctccataaaactgatgagatatataaagaaataaatgtcgagctttgttaccaatggatacctttccgttacattggaaccacacgagctgacgttagacataaaaactaatattaggaatgccgtatataagacgtatctccatagagaaattagtggtaaaatggccaagaaaatagaaattcgtgaagacgtggaattacctctcggcgaaatagttaataattctgtagttataaacgttccgtgtgtaataacctacgcgtattatcacgttggggatatagtcagaggaacattaaacatcgaagatgaatcaaatgtaactattcaatgtggagatttaatctgtaaactaagtagagattcgggtactgtatcatttagcgattcaaagtactgcttttttcgaaatggtaatgcgtatgacaatggcagcgaagtcactgccgttctaatggaggctcaacaaggtatcgaatctagttttgtttttctcgcgaatatcgtcgactcataaaaaagagaatagcggtaagtataaacacgaatactatggcaataattgcgaatgttttattctcttcgatatatttttgataatatgaaaaacatgtctctctcaaatcggacaaccatctcataaaatagttctcgcgcgctggagaggtagttgccgctcgtataatctctccagaataatatacttgcgtgtcgtcgttcaatttatacggatttctatagttctctgttatataatgcggtttgccctcatgattagacgacgacaatagtgttctaaatttagatagttgatcagaatgaatgtttattggcgttggaaaaattatccatacagcgtctgcagagtggttgatagttgttcctagatatgtaaaataatccaacttactaggcagcaaattgtctagataaaatactgaatcaaacggtgcagacgtattggcggatctaatggaatccaattgattaactatcttttgaaaatatacatttttatgatccaatacttgtaagaatatagaaataatgataagtccatcatcgtgtttttttgcctcttcataagaactatattttttcttattccaatgaacaagattaatctctccagagtatttgtacacatctatcaagtgattggatccataatcgtcttcctttccccaatatatatgtagtgatgataacacatattcattggggagaaaccctccacttatatatcctcctttaaaattaatccttactagttttccagtgttctggatagtggttggtttcgactcattataatgtatgtctaacggcttcaatcgcgcgttagaaattgcttttttagtttctatattaataggagatagttgttgcggcatagtaaaaatgaaatgataactgtttaaaaatagctcttagtatgggaattacaatggatgaggaagtgatatttgaaactcctagagaattaatatctattaaacgaataaaagatattccaagatcaaaagacacgcatgtgtttgctgcgtgtataacaagtgacggatatccgttaataggagctagaagaacttcattcgcgttccaggcgatattatctcaacaaaattcagattctatctttagagtatccactaaactattacggtttatgtactacaatgaactaagagaaatctttagacggttgagaaaaggttctatcaacaatatcgatcctcactttgaagagttaatattattgggtggtaaactagataaaaaggaatctattaaagattgtttaagaagagaattaaaagaggaaagtgatgaacgtataacagtaaaagaatttggaaatgtaattctaaaacttacaacacgggataaattatttaataaagtatatataagttattgcatggcgtgttttattaatcaatcgttggaggatttatcgcatactagtatttacaatgtagaaattagaaagattaaatcattaaatgattgtattaacgacgataaatacgaatatctgtcttatatttataatatgctagttaatagtaaatgaacttttacagatctagtataattagtcagattattaagtataatagacgactagctaagtctattatttgcgaggatgactctcaaattattacactcacggcattcgttaaccaatgcctatggtgtcataaacgagtatccgtgtccgctattttattaactactgataacaaaatattagtatgtaacagacgagatagttttctctattctgaaataattagaactagaaacatgtttagaaagaaacgattatttctgaattattccaattatttgaacaaacaggaaagaagtatactatcgtcatttttttctctagatccagctactactgataatgatagaatagacgctatttatccgggtggcatacccaaaaggggtgagaatgttccagagtgtttatccagggaaattaaagaagaagttaatatagacaattcttttgtattcatagacactcggttttttattcatggcatcatagaagataccattattaataaattttttgaggtaatcttctttgtcggaagaatatctctaacgagtgatcaaatcattgatacatttaaaagtaatcatgaaatcaaggatctaatatttttagatccgaattcaggtaatggactccaatacgaaattgcaaaatatgctctagatactgcaaaacttaaatgttacggccatagaggatgttattatgaatcattaaaaaaattaactgaggatgattgattaaaaaatataaattaatttaccatcgtgtatttttataacgggattgtccggcatatcatgtagatagttaccgtctacatcgtatactcgaccatctacgcctttaaatcctctatttattgacattaatctattagaattggaataccaaatattagtaccctcaattagtttattggtaatattttttttagacgatagatcgatggctcttgaaaccaaggttttccaaccggactcattgtcgatcggtgagaagtctttttcattagcatgaatccattctaatgatgtatgtttaaacactctaaacaattggacaaattcttttgatttgctttgaatgatttcaaataggtcttcgtctacagtaggcataccattagataatctagccattataaagtgcacgtttacatatctacgttctggaggagtaagaacgtgactattgagacgaatggctcttcctactatctgacgaagagacgcctcgttccatgtcatatctaaaatgaagatatcattaattgagaaaaaactaataccctcgcctccactagaagagaatacgcatgttttaatgcattctccgttagtgtttgattcttggttaaactcagccaccgccttgattctagtatcttttgttctagatgagaactctatattagagataccaaagactttgaaatatagtaataagatttctattcctgactgattaacaaatggttcaaagactagacatttaccatgggatgctaatattcccaaacatacatctataaatttgacgcttttctcttttaattcagtaaatagagagatatcagccgcactagcatcccctttcaatagttctccctttttaaaggtatctaatgcggatttagaaaactctctatctcttaatgaatttttaaaatcattatatagtgttgctatctcttgcgcgtattcgcccggatcacgattttgtctttcaggaaagctatcgaacgtaaacgtagtagccatacgtctcagaattctaaatgatgatatacctgtttttatttcagcgagtttagccttttgataaatttcttcttgctttttcgacatattaacgtatcgcattaatactgttttcttagcgaatgatgcagacccttctacgtcatcaaaaatagaaaactcgttattaactatatacgaacatagtcctcctagtttggagactaattctttttcatcgactagacgtttattctcaaatagcgattggtgttgtaaggatcctggtcgtagtaagttaaccaacatggtgaattcttgcacactattgacgataggtgtagccgataaacaaatcatcttatggttttttaacgcaatggtcttagataaaaaattatatactgaacgagtaggacggatcttaccatcttctttgattaatgatttagaaatgaagttatgacattcatcaataatgacgcatattctactcttggaattaatagttttgatattagtaaaaaatttatttctaaaattttgatcatcgtaattaataaaaatacaatccttcgttatctctggagcgtatctgagtatagtgttcatccaaggatcttctatcaaagcctttttcaccaataagataatagcccaattcgtataaatatccttaagatgtttgagaatatatacagtagtcattgttttaccgacacccgtttcatggaacaataaaagagaatgcatactgtctaatcctaagaaaactcttgctacaaaatgttgataatccttgaggcgtactacgtccgaccccatcatttcaacgggcatattagtagttctgcgtaaggcataatcgatataggccgcgtgtgatttactcatttatgagtgataagtaataactatgttttaaaaatcacagcagtagtttaactagtcttctctgatgtttgttttcgatactttttgaatcagaagtcatactagaataaagcaacgagtgaacgtaatagagagcttcgtatactctattcgaaaactctaagaacttattaatgaattccgtatccactggattgtttaaaatactaaattgaacactgttcacatccttccaagaagaagacttagtgacggacttaacatgagacataaataaatccaaattttttttacaaacatcactagccaccataatggcgctatctttcaaccagctatcgcttacgcattttagcagtctaacatttttaaagagactacaatatattctcatagtatcgattacacctctaccgaataaagttggaagtttaataatacaatatttttcgtttacaaaatcaaataatggtcgaaacacgtcgaaggttaacatcttataatcgctaatgtatagattgttttcagtgagatgattattagatttaatagcatctcgttcacgtttgaacagtttattgcgtgcgctgaggtcggcaactacggcgtccgctttagtactcctcccataatactttacgctattaatctttaaaatttcatagactttatctagatcgctttctggtaacatgatatcatgtgtaaaaagttttaacatgtcggtcggcattctatttagatcattaactctagaaatctgaagaaagtaattagctccgtattccagactaggtaatgggcttttacctagagacagattaagttctggcaatgtttcataaaatggaagaaggacatgcgttccctcccggatattttttacaatttcatccatttacaactctatagtttgttttcattattattagttattatctcccataatcttggtaatacttaccccttgatcgtaagataccttatacaggtcattacatacaactaccaattgtttttgtacataatagattggatggttgacatccatggtggaataaactactcgaacagatagtttatctttccccctagatacattagccgtaatagttgtcggcctaaagaatatctttggtgtaaagttaaaagttagggttcttgttccattattgctttttgtcagtagttcattataaattctcgagatgggtccgttctctgaatatagaacatcatttccaaatctaacttctagtctagaaataatatcggtcttattcttaaaatctattcccttgatgaagggatcgttaatgaacaaatccttggcctttgattcggctgatctattatctccgttatagacgttacgttgactagtccaaagacttacaggaatagatgtatcgatgatgttgatactatgtgatatgtgagcaaagattgttctcttagtggcatcactatatgttccagtaatggcggaaaactttttagaaatgttatatataaaagaattttttcgtgttccaaacattagcagattagtatgaagataaacactcatattatcaggaacattatcaatttttacatacacatcagcatcttgaatagaaacgataccatcttctggaacctctacgatctcggcagactccggataaccagtcggtgggccatcgctaacaataactagatcatccaacaatctactcacatatgcatctatataatctttttcatcttgtgagtaccctggatacgaaataaatttattatccgtatttccataataaggtttagtataaacagagagagatgttgccgcatgaacttcagttacagtcgccgttggttggtttatttgacctattactctcctaggtttctctataaacgatggtttaatttgtacattcttaaccatatatccaataaagctcaattcaggaacataaacaaattctttgttgaacgtttcaaagtcgaacgaagagtcacgaataacgatatcggatactggattgaaggttaccgttacggtaatttttgaatcggatagtttaagactgctgaatgtatcttccacatcaaacggagttttaatataaacgtatactgtagatggttctttaatagtgtcattaggagttaggccaatagaaatatcattaagttcactagaatatccagagtgtttcaaagcaattgtattattgatacaattattatataattcttcgccctcaatttcccaaataacaccgttacacgaagagatagatacgtgattaatacatttatatccaacatatggtacgtaactgaatcttcccatacctttaacttctggaagttccaaactcagaaccaaatgattaagcgcagtaatatactgatccctaatttcgaagctagcgatagcctgattgtctggaccatcgtttgtcataactccggatagagaaatatattgcggcatatacaaagttggaatttgactatcgactgcgaagacattagaccgtttaatagagtcatccccaccgatcaaagaattaatgatagtattattcattttctatttaaaatggaaaaagcttacaataaactccgtagagaaatatctataatttgtgagttttccttaaagtaacagcttccgtaaacgccgtctttatctcttagtaggtttattgtatttatgaccttttccttatcttcatagaatactaaaggcaacaaagaaatttttggttcttctctaagagctacgtgagacttaaccatagaagccaacgaatccctacatattttagaacagaaataccctacttcaccacccttgtatgtctcaatactaataggtctaaaaaccaaatcttgattacaaaaccaacacttatcaattacactatttgtcttaatagacacatctgccatagatttataatactttggtagtatacaagcgagtgcttcttctttagcgggcttaaagactgctttaggtgctgaaataaccacatctggaaggcttactcgcttagccatttaattacggaactatttttttatacttctaatgagcaagtagaaaacctctcatctacaaaaacgtactcgtgtccataatcctctaccatagttacacgttttttagatctcatatgtgctaaaaagttttcccatactaattggttactattatttttcgtataatttttaacagtttgaggttttagatttttagttacagaagtgatatcgaatattttatccaaaaagaatgaataattaattgtcttagaaggagtgttttcttggcaaaagaataccaagtgcttaaatatttctactacttcattaatcttttctgtactcagattcagtttctcatcttttacttgattgattatttcaaagactaacttataatcctttttatttattctctcgttagccttaagaaaactagatacaaaatttgcatctacatcatccgtggatatttgatttttttccatgatatccaagagttccgagataatttctccagaacattgatgagacaataatctccgcaatacatttctcaaatgaataagtttattagacacgtggaagtttgactttttttgtacctttgtacatttttgaaataccgactcgcaaaaaatacaatattcatatccttgttcagatactataccgttatgtctacaaccgctacataatcgtagattcatgttaacactctacgtatctcgtcgtccaatattttatataaaaacattttatttctagacgttgccagaaaatcctgtaatatttttagttttttgggctgtgaataaagtatcgccctaatattgttaccgtcttccgccaatatagtagttaaattatccgcacatgcagaagaacaccgcttaggcggattcagtacaatgttatatttttcgtaccaactcatttaaatatcataatctaaaatagttctgtaatatgtctagcgctaatatattgatcataatcctgtgcataaattaagatacaacaatgtctcgaaatcatcgacatggcttcttccatagttagaagatcgtcgtcaaagttagcaacgtgattcatcaacatttgctgttttgaggcagcaaatactgaaccgtcgccattcaaccattcataaaaaccatcgtctgaatccattgataatttcttgtactggtttttgagagctcgcatcaatctagcatttctagctcccggattgaaaacagaaagaggatcgtacatccagggtccattttctgtaaatagaatcgtataatgtcccttcaagaagatatcagacgatccacaatcaaagaattggtctccgagtttgtaacaaactgcggactttaacctatacatgataccgtttagcataatttctggtgatacgtcaatcggagtatcatctattagagatctaaagccggtgtaacattctccaccaaacatattcttattctgacgtcgttctacataaaacatcattgctccattaacgataacaggggaatgaacagcactacccatcacattagttcccaatggatcaatgtgtgtaactccagaacatcttccatagcctatgttaggaggagcgaacaccactcttccactattgccatcgaatgccatagaataaatatccttggaattgatagaaatcggactgtcggatgttgtgatcatcttcataggattaacaactatgtatggtgccgcctgaagtttcatatcgtaactgatgccgtttataggtctagccacagaaaccaacgtaggtctaaatccaactatagacaaaatagaagccaatatctgttcctcatctgtcataacttgagagcatccagtatgaataatcttcattagatggggatctaccgcatcatcatcgttacaataaaaaattcccattctaatgttcataattgcttttctaatcatggtatgcatgtttgctctctgaatctctgtggaaattagatctgatacacctgtaatcactatcggattatcctccgtaagacgattaaccaacaacatataattataagactttacttttctaaattcataaagttgctggattaggctataggtgtctccatgtacatacgcgttctcgagcgcaggaagtttaataccgaatagtgccatcagaataggatgaatatagtaattagtttctggttttctataaataaaagacaaatcttgtgaactagacatatcggtaaaatgcatggattggaatcgtgtagtcgacagaagaatatgatgattagatggagagtatattttatctaactctttgagttggtcaccgattctaggactagctcgagaatgaataagtactaaaggatgagtacatttcacagaaacactagcattgttcaatgtgctctttacatgggtaaggagttgaaatagctcgtttctatttgttctgacaatatttagtttattcataatgttaagcatatcctgaatagtaaagttagatgtgtcatacttgttagtagttagatatttagcaattgcattcccatcatttctcaatctcgtactccaatcatgcgtggatgctacttcgtcgatggaaaccatacaatcctttttgataggctgttgagattgatcatttcctgcacgtttaggtttggtacgttgatttctagcccctgcggatataaagtcatcgtctacaatttgggacaatgaattgcatacactacaagacaaagatttatcagaagtgtgaatatgatcttcatctaccaaagaaagagtttgattagtataactagattttagtcctgcgttagatgttaaaaaaacatcgctattgaccacggcttccattatttatattcgtagtttttactcgaaagcgtgattttaatatccaatcttattacttttggaatcgttcaaaacctttgactagttgtagaatttgatctattgccctacgcgtatactcccttgcatcatatacgttcgtcaccagatcgtttgtttcggcctgaagttggtgcatatctctttcaacattcgacatgagatccttaagggccatatcgtctagattttgttgagatgctgctcctggatttggattttgttgtgctgttgtacatactgtaccaccagtaggtgtaggagtacatacagtggccacaataggaggttgagaaagtgtaaccgttggagtagtacaagaaatacttccatccgattgttgtgtacatgtagttgttggtaacgtctgagaaggttgggtagatggcggcgtcgtcgttttttgatctttattaaatttagagataatatcctgaacagcattgctcggcgtcaacgctggaaggagtgaactcgccggcgcatcagtatcttcagacagccaatcaaaaagattagacatatcagatgatgtattagtttgttgtcgtggttttggtgtaggagcagtactactaggtagaagaataggagccgatgtagctgttggaaccggctgtggagttatatgaatagttggttgtagcggttggataggctgtctgctggcggccatcatattatctctagctagttgttctcgcaactgtctttgataatacgactcttgagactttagtcctatttcaatcgcttcatcctttttcgtatccggatccttttcttcagaataatagattgacgactttggtgtagaggattctgccagcctctgtgagaacttgttaaagaagtccatttaaggctttaaaattgaattgcgattataagattaaatggcagacacagacgatattatcgactatgaatccgatgatctcaccgaatacgaggatgatgaagaagaggaagaagatggagagtcactagaaactagtgatatagatcccaaatcttcttataagattgtagaatcagcatccactcatatagaagatgcgcattccaatcttaaacatatagggaatcatatatctgctcttaaacgacgctatactagacgtataagtctatttgaaatagcgggtataatagcagaaagctataacttgcttcaacgaggaagattacctctagtttcagaattttctgacgaaacgatgaagcaaaatatgctacatgtaattatacaagagatagaggagggttcttgtcctatagtcatcgaaaagaacggagaattgttgtcggtaaacgattttgacaaagatggtctaaaattccatctagactatattatcaaaatttggaaacttcaaaaacgatattagaatttatacgaatatcgttctctaaatgtcacaatcaagtctcgcatgttcagcaatttattgtcgtactttatatcgtgttcattaacgatatcttgcaaaatagtaatgattctatcttccttcgatagatattcttcagagattattgtcttatattctttcttgttatcagatatgaatttgataagactttgaacattattgatacccgtctgtttaattttttctacagatattttagttttggcagattctatcgtatctgtcaatagacatccaacatcgacattcgacgtcaattgtctataaatcaacgtataaattttagaaataacattagcgaattgttgtgcgttgatgtcgttattctgaaacagtatgattttaggtagcattttcttaacaaagagaacgtatttattgttactcagttgaacagatgatatatccagattactaacgcatctgattccgtataccaaactttcagaagaaatggtatacaattgtttgtattcattcaatgtctctttttcagaaattagtttagagtcgaatactgcaataattttcaagagatagttttcatcagataagattttatttagtgtagatatgataaaactattgttttgttggagaacttgatacgccgcgttctctgtagtcgacgctctcaaatgggaaacaatctccattatttttttggaatcggatactatatcttcggtatcttgacgcagtctagtatacatagagttaagagagattagagtttgtacattaagcaacatgtctctaaatgtggctacaaacttttcctttttcacatcatctagtttattatataccgatttcacaacggcaccagatttaaggaaccagaatgaaaaactctgataactacaatatttcatcatagttacgattttatcatcttctatagttggtgtaatagcgcatacctttttctccaagactggaaccaacgtcataaaaatgtttaaatcaaaatccatatcaacatctgatgcgctaagaccagtctcgcgttcaagattatctttactaatggtgacgaactcatcgtataaaactctaagtttgtccattatttatttacagatttagttgtttaatttatttgtgctcttccagagttgggatagtatttttctaacgtcggtattatattattaggatctacgttcatatgtatcataatattaatcatccacgttttgataaatctatctttagcttctgaaataacgtatttaaacaaaggagaaaaatatttagctacggcatcagacgcaataacattttttgtaaatgtaacgtatttagacgacagatcttcgttaaaaagttttccatctatgtagaatccatcggttgttaacaccattcccgcgtcagattgaataggagtttgaatagtttgttttggaaatagatccttcaataacttatagttgggtgggaaaaaatcgattttatcactagactctttcttttttactatcattacctcatgaactatttcttgaatgagtatatgtattttctttcctatatcggacgcgttcattggaaaatataccatgtcgttaactataagaatatttttatcctcgtttacaaactgaataatatcagatgtagttcgtaaacgaactatatcatcaccagcacaacatctaactatatgatatccactagtttcctttagccgtttattatcttgttccatattagcagtcattccatcatttaagaaggcgtcaaaaataatagggagaaatgacattttggattctgttacaactttaccaaaattaaggatatacggacttactatctttttctcaacgtcaatttgatgaacacacgatgaaaatgtgcttctatgagattgatcatgtagaaaacaacaagggatacaatatttccgcatatcatgaaatatattaagaaatcccaccttattatatttccccaaaggatccatgcacgtaaacattatgccgttatcattaataaagacttctttctcatcggatctgtaaaagttgttactgatttttttcattccaggatctagataattaataatgatgggttttctattcttattctttgtattttggcatatcctagaccagtaaacagtttccactttggtaaaatcagcagacttttgaacgctattaaacatggcattaatggcaataactaaaaatgtaaaatatttttctatgttaggaatatggtttttcactttaatagatatatggtttttggccaaaatgatagatatttttttatccgaggatagtaaaatattattagtcgccgtctctataaaaatgaagctagtctcgatatccaattttattctagaattgataggagtcgccaaatgtaccttatacgttatatctcccttgatgcgttccatttgtgtatctatatcggacacaagatctgtaaatagttttacgttattaatcatcacggtatcgccgtcgctagataacgctaatgtaccatccaagtcccaaatggagagatttaactgttcatcgtttagaataaaatgattaccggtcatattaataaagtgttcatcgtatctagataacaacgacttataattaatgtccaagtcttgaactcgctgaatgatcttttttaacccagttagttttagattggtacgaaatatattgttaaactttgattctacagtaatgtccaaatctagttgtggaaatacttccatcaacattgtttcaaacttgataatattattatctacatcttcgtacgatccaaattccggaatagatgtatcgcacgctctggccacccagataaccaaaaagtcacacgctccaggatatacattgtataaaaagctatcgttttttagtagggtttttttctgcgtgtatacgaagggattaaaaatagtattatcaacgtaactatattccaaattattcttatgagaatagataataatatcgtccttaatatctaacaaatttcctaaatatccctttaattgagtcattcgaagcgtcaatagaatatgtctcttaactatttccggctgttgtatatttaaatgacttcgtaaaaaataatatatgggcgacttctcatctatgtaatcatatggagtgagatatagggctcgttctacctcctgccccttacccacctgtaataccaattgcggacttactatatatcgcatatttatatcgtggggtaaagtgaaaatctactaccgatgatgtaagtcttacaatgttcgaaccagtaccagatcttaatttggaggcctccgtagaactaggggaggtaaatatagatcaaacaacacctatgataaaggagaatagcggttttatatcccgcagtagacgtctattcgcccatagatctaaggatgatgagagaaaactagcactacgattctttttacaaagactttattttttagatcatagagagattcattatttgttcagatgcgttgacgctgtaaaagacgtcactattaccaaaaaaaataacattatcgtggcgccttatatagcacttttaactatcgcatcaaaaggatgcaaacttacagaaacaatgattgaagcattctttccagaactatataatgaacatagtaagaaatttaaattcaactctcaagtatccatcatccaagaaaaactcggataccagtttggaaactatcacgtttatgattttgaaccgtattactctacagtagctctggctattcgagatgaacattcatctggcatttttaatatccgtcaagagagttatctggtaagttcattatctgaaataacatatagattttatctaattaatctaaaatctgatcttgttcaatggagtgctagtacgggcgctgtaattaatcaaatggtaaatactgtattgattacagtgtatgaaaagttacaactggtcatagaaaatgattcacaatttacatgttcattggctgtggaatcaaaacttccaataaaattacttaaagatagaaatgaattatttacaaaattcattaacgagttaaaaaagaccagttcattcaagataagcaaacgcgataaggatacgctactaaaatattttacttaggactggagttagaatttatagacgactcatttcgtttatcattgttactattattactattactatcattattagtgttggcattattagtattcttcttgtcatcttgttcagaaatatacagcaatgctatacctaatactaaatacattatcatgctcgcaatggctctaacaacaacgaaccaaaatgaatttggtcgtagcttttgttcacaaaaatacataaagaaatgtctacataaatctatggcgccattggctacttgaaatagcgccagtcctcctacagattttaatatagctgtataacatgacatttattcatcatcaaaagagacagagtcaccatctgtcatatttagattttttttcatgtgttcaaagtatcctctactcatttcattataatagtttatcatacttagaattttaggacggatcaatgagtaagacttgactagatcgtcagtagtaatttgtgcatcgtctattctgcatccgcttcgtcgaataatgtatagcatcgctttgagattctccatagctatcaagtctttatacaatgacatggaaatatctgtgaatactttatacttctccaacatcgatgccttaacatcatcgcctactttagcattgaaaatacgttctattgtgtagatggatgtagcaagatttttaaacaacaatgccatcttacacgatgattgcctcaagtctccaatcgtttgtttagaacgattagctacagagtccaatgcttggctgactagcatattattatctttagaaattgtattcttcaatgaggcgtttatcatatctgtgatttcgttagtcatattacagtctgactgggttgtaatgttatccaacatatcacctatggatacggtacacgtaccagcatttgtaataatcctatctaagatgttgtatggcattgcgcagaaaatatcttctcctgtaatatctccactctcgataaatctactcagattattcttaaatgccttattctctggagaaaagatatcagtgtccatcatttcattaatagtatacgcagaaaagataccacgagtatcaattctatccaagatacttatcggttccgagtcacagataatggtttcctctccttcgggagatcctgcatagaaatatctaggacaatagtttctatactgtctgtaactctgataatctctaaagtcactaactgataccatgaaattgagaagatcaaacgctgaagtaattaatttttctgcctcgtttttactacaactagttttcatcaatgtagtgacgatgtattgtttagttacttttggtctaatactgatgatagagatattattgcttcccataatggatcttctagtagtcaccttaaagcccattgatgcgaatagcagatagataaagtcttggtatgactcctttctaatatagtacggactacctttgtcacccaactttatacccacataagccataacaacctctttaatagccgtttcatgaggtttatcagccatgagcctgagtagttggaagaatctcatgaatcccgtctcagaaagtcctatatgcatgatagatttatctttcctgggaaactctcgtatagtcatagatgaaatactctttaaagtttctgaaataagattagtaacagtcttacctccgactactctaggtaacaaacaaactctaataggtgttttctctgcggagataatatcagaaaggatagagcaataagtagtattattgtgattataaagaccgaatacataacaggtagaatttataaacatcatgtcctgaaggtttttagacttgtattcctcgtaatccataccgtcccaaaacatggatttggtaactttgatagccgtagatctttgttccttcgccaacaggttaaagaaattaataaagaatttgttgtttctatttatgtccacaaattgcacgtttggaagcgccacggttacattcactgcagcattttgaggatcgcgagtatgaagtacgatgttattgtttactggtatatctggaaagaaatctaccagtctaggaataagagattgatatcgcatagaaatagtaaagtttataatctcatcatcgaagagcattttgttaccattgtaataaatatccactctgtcatatgtataaatgaagtactgttcaaacatgatgagatgtttatatgttggcatagtagtgagatcgacgtttggtaatggcaatgtattaagattaactccataatgtctagcagcatctgcgatgttataagcgtcgtcaaagcggggtcgatcttgtattgttatatattgtctaacacctataagattatcaaaatcttgtctgcttaatacaccgttaacaatttttgccttgaattcttttattggtgcattaataacatccttatagaggatgttaaacaaataagtgttatcaaagttaagatctggatatttcttttctgctagaacatccattgagtcggagccatctggtttaatataaccaccgataaatctagctctgtattctgtatccgtcaatctaatattaagaaggtgttgagtgaaaggtggaagatcgtaaaagctgtgagtattaatgataggattagtttccgaactaatgttaattggggtattaataatatctatatttccagcgttaagtgtaacattaaacagttttaattcacgtgacgtggtatcaattaaataattaatgcccaatttggatatagcagcctgaagctcatcttgtttagttacggatcctaatgagttattaagcaatatatcgaacggatgaacgaaggttgttttaagttggtcacatactttgtaatctagacatagatgcggaagaacggtagaaactatacgaaataaatattcagagtcctctaattgatcaagagtaactattgacttaataggcatcatttatttagtattaaatgacgaccgtaccagtgacggatatacaaaacgatttaattacagagttttcagaagataattatccatctaacaaaaattatgaaataactcttcgtcaaatgtctattctaactcacgttaacaacgtggtagatagagaacataatgccgccgtagtgtcatctccagaggaaatatcctcacaacttaatgaagatctatttccagatgatgattcaccggccactattatcgaacgagtacaacctcatactactattattgacgatactccacctcctacgtttcgtagagagttattaatatcggaacaacgtcaacaacgagaaaaaagatttaatattacagtatcgaaaaatgctgaagcaataatggaatctagatctatgataacttctatgccaacacaaacaccatccttgggagtagtttatgataaagataaaagaattcagatgttagaggatgaagtggttaatcttagaaatcaacgatctaatacaaaatcatctgataatttagataattttaccaaaatactatttggtaagactccgtacaaatcaacagaagttaataagcgtatagccatcgttaattatgcaaatttgaacgggtcccccttatcagtcgaggacttggatgtttgttcggaggatgaaatagatagaatctataaaacgattaaacaatatcacgaaagtagaaaacgaaaaattatcgtcactaacgtgattattattgtcataaacattatcgagcaggcattgctaaaactcggatttgaagaaatcaaaggactgagtaccgatatcacttcagaaattatcgatgtggagatcggagatgactgcgatgctgtagcatctaaactaggaatcggtaacagtccggttcttaatattgtattgtttatactcaagatattcgttaaacgaattaaaattatttaatttaatacattcccatatccagacaacaatcgtctggattaatctgttcctgtcgtctcataccggacgacatattaatctttttattagtgggcatctttttagatggtttctttttcccagcattaactgagtcgatacctagaagatcgtgattgatctctccgaccattccacgaacttctaattggccgtctctgacggtaccataaactattttaccagcattagtaacagcttggacaatctgaccatccatcgcattgtacgatgtagtagtaactgttgttctacgtctaggagcaccagaagtatttttggagcccttggatgttgatgtagaagaagacgaggattttgattttggtttacatgtaatacattttgaactctttgattttgtatcacatgcgccggcagtcacatctgtttgagaattaagattattgttgcctcctttgacggctgcatctccaccgatttgcgctagtagatttttaagctgtggtgtaatcttattaactgtttcgatataatcatcgtaactgcttctaacggctaaattttttttatccgccatttagaagctaaaaatatttttatttatgcagaagatttaactagattatacaatgaactaatatgatccttttccagattatttacaaacttggtattttttggttctggaggaggcgaatttaaattcggacttggattcggattttgtaagttcttgatcttattatacatcgagtataggatggcgacagtaactgctacacaaataccgatcaaaagaagaataccaatcatttattgacaataacttcactattgatcaagtatgcaatatatcatcttttcactaaataagtagtaataatgattcaacaatgtcgagatatatggacgataataatttagttcatggaaatatcgctatgattggtgtgaatgactccgctaactctgtggggtgcgcagtgctttccccacatagaataaattagcattccgactgtgataataataccaagtataaacgccataatactcaatactttccatgtacgagtgggactggtagacttactaaagtcaataaaggcgaagatacacgaaagaatcaaaagaatgattccagcgattagcacgccggaaaaataatttccaatcataagcatcatgtccatttaactaataaaaattttaaatcgccgaatgaacaaagtggaatataaaccatataaaaacaatagtttgtactgcaaaaataatatctatttttgttttcgaagatatggtaaaattaaatagtagtacacagcatgttataactaacagcagcaacggctcgtaattacttatcatttactagacgaaaaggtggtgggatattttcttgctcaaataatacgaatatatcacccatccattttatgcgatgtttatatactctaatctttaatagatctatagacgacgggtttaccaacaatatagattttatcgattcatctaatttaaacccttccttaaacgtgaatgatctattatctggcataacgatgaccctacctgatgaatcggacaatgtactgggccatgtagaataaattatcaacgaattatcgtctacgaacatttatatcatttgttttaattttaggacgcgaataaatggatataaaatagaaaataacagatattacaaccagtgttatggccgcgcccaaccaggtaggcagttttattttatcttttactacaggttctcctggatgtacgtcaccaacggcggacgtagttctagtacaattagacgtaagttccgcttgggaattttttaacgctaaagagttaacgttaatcgtgcacccaacgtatttacatctagttcgttgaacatcttgattataatataaccattttctatctctagattcgtcagtgcactcatgtaaccaacataccctaggtcctaaatatttatctccggaattagattttggataattcgcgcaccaacaatttctatttcctttatgatcgttacaaaagacgtataatgccgtatccccaaaagtaaaataatcaggacgaataattctaataaactcagaacaatatctcgcatccatatgtttggagcaaatatcggaataagtagacatagccggtttccgttttgcacgtaaccattctaaacaattggggtttccaggatcgtttctacaaaatccagtcatgaaatcgtcacaatgttctgtcttgtaattattattaaatatttttggacagtgtttggtatttgtcttagaacaacattttgccacgctatcactatcgcccaggagataatccttttttataaaatgacatcgttgcccggatgctatataatcagtagcgtgttttaaatccttaatatattcaggagttacctcgttctgataatagattaatgatccaggacgaaatttgaaagaactacatggttctccatgaattaatacatattgtttagcaaattcaggaactataaaactactacaatgatctatcgacataccatctatcaaacaaaacttgggtttaatttctcccggagatgtttcataatagtacgtataactttcttctgcaaacttaacagctctattatattcaggataattaaaacctaattccatatatttgtctcgtatatctgctattcctggtgctattttgattctattaagagtaacagctgcccccattcttaataatcgtcagtatttaaactgttaaatgttggtatatcaacatctaccttatttcccgcagtataaggtttgttgcaggtatactgttcaggaatggttacatttatacttcttctatagtcctgtctttcgatgttcatcacatatgcaaagaacagaataaacaaaataatgtaagaaataatattaaatatctgtgaattcgtaaatacattgattgccataataattacagcagctacaatacacacaatagacattcccacagtgttgccattacctccacgatacatttgagttactaagcaataggtaataactaagctagtaagaggcaatagaaaagatgagataaatatcatcaatatagagattagaggagggctatatagagccaagacgaacaaaatcaaaccgagtaacgttctaacatcattatttttgaagattcccaaataatcattcattcctccataatcgttttgcatcatacctccatctttaggcataaacgattgctgctgttcctctgtaaataaatctttatcaagcactccagcacccgcagagaagtcgtcaagcatattgtaatatcttaaataactcatttatatattaaaaaatgtcactattaaagatggagtataatctttatgccgaactaaaaaaaatgacttgtggtcaacccctaagtctttttaacgaagacggggatttcgtagaagttgaaccgggatcatcctttaagtttctgatacctaagggattttacgcctctccttccgtaaagacgagtctagtattcgagacattaacaacgaccgataataaaatcactagtatcaatccaacaaatgcgccaaagttatatcctcttcaacgcaaagtcgtatctgaagtagtttctaatatgaggaaaatgatcgaatcaaaacgtcctctatacatcactcttcacttggcgtgtggatttggtaagactattaccacgtgttatcttatggctacacacggtagaaaaaccgtcatttgcgtacccaataaaatgttaatacatcaatggaagacacaggtagaggcagtcggattggaacataagatatccatagatggagtaagtagtctattaaaggaactaaagactcaaagtccggatgtattaatagtagtcagtagacatctgacaaacgatgccttttgtaaatatatcaataagcattatgatttgttcatcttggatgaatcacatacgtataatctgatgaacaatacagcagttacaagatttttagcgtattatcctccgatgatgtgttattttttaactgctacacctagaccatctaaccgaatttattgtaacagtattattaatattgccaagttatccaatctaaaaaaaactatctatgcagtagatagtttttttgagccatattccacagataatattagacatatggtaaaacgactagatggaccatctaataaatatcatatatataccgagaagttattatctgtagacgagcctagaaatcaacttattcttgataccctggtagaagaattcaagtcaggaactattaatcgcattttagttattactaaactacgtgaacatatggtattattctacaaacgattattagattttttcggaccagaggttgtatttataggagacgcccaaaatagacgtactccagatatggtcaaatcaatcaaggaactaaatagatttatattcgtatccaccttattttattccggtactggtttagatattcctagtttggattcgttgttcatttgctcggcagtaatcaacaatatgcaaatagagcaattactagggagggtatgtcgagaaacagaactattagataggacggtatatgtatttcctaacacatccatcaaagaaataaagtacatgataggaaatttcatgcaacgaattattagtctgtctgtagataaactaggatttaaacaaaaaagttatcggaaacatcaagaatccgatcccacttctgcatgtacaacatcatccagagaagaacgtgtattaaatagaatatttaactcgcaaaatcgttaagaagtttaagcgacgatccgcatgctgcgcaggccagtgtattacccctcatagtattaatataatccaatgatacttttgtgatgtcggaaatcttaaccaatttagactgacaggcagaacacgtcatgcaatcatcatcgtcatcgataactgtagtcttgggcttctttttgcgactcttcattccggaacgcacattggtgctatccatttaggtagtaaaaaataagtcagaatatgccctataacacgatcgtgcaaaacctggtatatcgtctctatctttatcacaatatagtgtatcgacatttttattattattgacctcgtttatcttggaacatggaatgggaacatttttgttatcaacggccatctttgccttaattccagatgttgtaaaattataactaaacagtctatcatcgacacaaatgaaattcttgtttagacgtttgtagtttacgtatgcggctcgttcgcgtctcattttttcagatattgcaggtactataatattaaaaataagaatgaaataacataggattaaaaataaagttatcatgacttctagcgctgatttaactaacttaaaagaattacttagtctgtacaaaagtttgagattttcagattctgcggctatagaaaagtataattctttggtagaatggggaacatctacttactggaaaataggcgtgcaaaaggtagctaatgtcgagacgtcaatatctgattattatgatgaggtaaaaaataaaccgtttaatattgatccgggctattacattttcttaccggtatattttgggagcgtctttatttattcgaagggtaaaaatatggtagaacttggatctggaaactcttttcaaataccagatgatatgcgaagtgcgtgtaacaaagtattagacagcgataacggaatagactttctgagatttgttttgttaaacaatagatggataatggaagatgctatatcaaaatatcagtctccagttaatatatttaaactagctagtgagtacggattaaacatacccaaatatttagaaattgaaatagaggaagacacattatttgacgacgagttatactctattatagaacgctctttcgatgataaatttccaaaaatatccatatcgtatattaagttgggagaacttagacggcaagttgtagactttttcaaattctcattcatgtatattgagtccatcaaggtagatcgtataggagataatatttttattcctagcgttataacaaaatcaggaaaaaagatattagtaaaagatgtagaccatttaatacgatccaaggttagagaacatacatttgtaaaagtaaaaaagaaaaacacattttccattttatacgactatgatggaaacggaacagaaactagaggagaagtaataaaacgaattatagacactataggacgagactattatgttaacggaaagtatttctctaaggttggtagtgcaggcttaaagcaattgactaataaattagatattaatgagtgcgcaactgtcgatgagttagttgatgagattaataaatccggaactgtaaaacgaaaaataaaaaaccaatcagcatttgatttaagcagagaatgtttgggatatccagaagcggattttataacgttagttaataacatgcggttcaaaatagaaaattgtaaggttgtaaatttcaatattgaaaatactaattgtttaaataacccgagtattgaaactatatatggaaactttaaccagttcgtctcaatctttaatgtcgtcaccgatgtcaaaaaaagattattcgagtgaaataatatgcgcctttgatataggtgcaaaaaatcctgccagaactgttttagaagtcaaggataactccgttagggtattggatatatcaaaattagactggagttctgattgggaaaggcgcatagctaaagatttgtcacaatatgaatacactacagttcttctagaacgtcagcctagaaggtcgccgtatgttaaatttatctattttattaaaggctttttatatcatacatcggctgccaaagttatttgcgtctcgcctgtcatgtctggtaattcatatagagatcgaaaaaagagatcggtcgaagcatttcttgattggatggacacattcggattgcgagactccgttccggatagacgcaaattagacgatgtagcggatagtttcaatttggctatgagatacgtattagataaatggaatactaattatacaccttataataggtgtaaatctagaaattacataaaaaaaatgtaataacgttagtaacgccattatggataatctatttacctttctacatgaaatagaagatagatatgccagaactatttttaactttcatctaataagttgcgatgaaataggagatatatatggtcttatgaaagaacgcatttcctcagaggatatgtttgataatatagtgtataataaagatatacatcctgccattaagaaactagtgtattgcgacatccaacttactaaacacattattaatcagaatacgtatccggtatttaacgattcttcacaagtgaaatgttgtcattatttcgacataaactcagataatagcaatattagctctcgtacagtagagatatttgagagggaaaagtcatctcttgtatcatatattaaaactaccaataagaagagaaaggtcaattacggcgaaataaagaaaactgttcatggaggcactaatgcaaattacttttccggtaaaaagtctgacgagtatctgagtactacagttagatccaacattaatcaaccttggatcaaaaccatctctaagaggatgagagttgatatcattaatcactctatagtaacgcgtggaaaaagctctatattacaaactatagaaattatttttactaatagaacatgtgtgaaaatattcaaggattctactatgcacattattctatccaaggacaaggatgaaaaggggtgtatacacatgattgacaaattattctatgtctattataatttatttctgttgttcgaagatatcatccaaaacgagtactttaaagaagtagctaatgttgtaaaccacgtactcacggctacggcattagatgagaaattattcctaattaagaaaatggctgaacacgatgtttatggagttagcaatttcaaaatagggatgtttaacctgacatttattaagtcgttggatcataccgttttcccctctctgttagatgaggatagcaaaataaagttttttaaggggaaaaagctcaatattgtagcattacgatctctggaggattgtataaattacgtgactaaatccgagaatatgatagaaatgatgaaggaaagatcgactattttaaatagcatagatatagaaacggaatcggtagatcgtctaaaagaattgcttctaaaatgaaaaaaaacactaattcagaaatggatcaacgactagggtataagtttttggtgcctgatcctaaagccggagttttttatagaccgttacatttccaatatgtatcgtattctaattttatattgcatcgattgcatgaaatcttgaccgtcaagcggccactcttatcgtttaagaataatacagaacgaattatgatagaaattagcaatgttaaagtgactcctccagattactcacctataatcgcgagtattaaaggtaagagttatgacgcattagccacgttcactgtaaatatctttaaagaggtaatgaccaaagagggtatatccatcactaaaataagtagttatgagggaaaagattctcatttgataaaaattccgctactaataggatacgggaataaaaatccacttgatacagccaagtatcttgttcctaatgtcataggtggagtctttatcaataaacaatctgtcgaaaaagtaggaattaatctagtagaaaagattacaacatggccaaaatttagggttgttaagccaaactcattcactttctcgttttcctccgtatcccctcctaatgtattaccgacaagatatcgccattacaagatatctctggatatatcacaattggaagcgttgaatatatcatcgacaaagacatttataacggtcaatattgttttgctgtctcaatatttatctagagtgagtctagaattcattagacgtagtttatcatacgatatgcctccagaagttgtctatctagtaaacgcgataatagatagtgctaaacgaattactgaatctattactgactttaatattgatacatacattaatgacctggtggaagctgaacacattaaacaaaaatctcagttaacgatcaacgagttcaaatatgaaatgctgcataactttttacctcatatgaactatacacccgatcaactaaagggattttatatgatatctttactaagaaagtttctctactgtatcttccacacttctagatatccagatagagattcgatggtttgtcatcgcatcctaacgtacggcaaatattttgagacgttggcacatgatgaattagagaattacataggcaacatccgaaacgatatcatgaacaatcacaagaacagaggcacttacgcggtaaacattcatgtactaacaactcccggacttaatcacgcgttttctagcttattgagtggaaagttcaaaaagtcagacggtagttatcgaacacatcctcactattcatggatgcagaatatttctattcctaggagtgttggattttatccggatcaagtaaagatttcaaagatgttttctgtcagaaaataccatccaagtcaatatctttacttttgttcatcagacgttccggaaagaggtcctcaggtaggtttagtatctcaattgtctgtcttgagttccattacaaatatactaacgtctgagtatttggatttggaaaagaaaatttgtgagtatatcagatcatattataaagatgatataagttactttgaaacaggatttccaatcactatagaaaatgctctagtcgcatctcttaatccaaatatgatatgtgattttgtaactgactttagacgtagaaaacggatgggattcttcggtaacttggaggtaggtattactttagttagggatcacatgaatgaaattcgcattaatattggagcgggaagattagtcagaccattcttggttgtggataacggagagctcatgatggatgtgtgtccggagttagaaagcagattagacgacatgacattctctgacattcagaaagagtttccgcatgtcatcgaaatggtagatatagaacaatttacttttagtaacgtatgtgaatcggttcaaaaatttagaatgatgtcaaaggatgaaagaaagcaatacgatttatgtgactttcctgccgaatttagagatggatatgtagcatcttcattagtgggaatcaatcacaattctggacccagagctattcttggatgtgctcaagctaaacaagctatctcttgtctgagctcggatatacgaaataaaatagacaatggaattcatttgatgtatccagagaggccaatcgtgattagtaaggctttagaaacttcaaagattgcggctaattgcttcggccaacatgttactatagcattaatgtcgtacaaaggtatcaatcaagaggatggaattatcatcaaaaaacaatttattcagagaggcggtctcgatattgttacagccaagaaacatcaagtagaaattccattggaaaactttaataacaaagaaagagataggtctaacgcctattcaaaattagaaagtaatggattagttagactgaatgctttcttggaatccggagacgctatggcacgaaatatctcatcaagaactcttgaagatgattttgctagagataatcagattagcttcgatgtttccgagaaatataccgatatgtacaaatctcgcgttgaacgagtacaagtagaacttactgacaaagttaaggtacgagtattaaccatgaaagaaagaagacccattctaggagacaaatttaccactagaacgagtcaaaagggaacagtcgcgtatgtcgcggatgaaacggaacttccatacgacgaaaatggtatcacaccagatgtcattattaattctacatccatcttctctagaaaaactatatctatgttgatagaagttattttaacagccgcatattctgctaagccgtacaacaataagggagaaaaccgacctgtctgttttcctagtagtaacgaaacatccatcgatacatatatgcaattcgctaaacaatgttatgagcattcaaatccgaaattgtccgatgaagaattatcggataaaatcttttgtgaaaagattctctatgatcctgaaacggataagccttatgcatccaaagtattttttggaccaatttattacttgcgtctgaggcatttaactcaggacaaggcaaccgttagatgtagaggtaaaaagacgaagctcattagacaggcgaatgagggacgaaaacgtggaggaggtatcaagttcggagaaatggagagagactgtttaatagcgcatggtgcagccaatactattacagaagttttgaaagattcggaagaagattatcaagatgtgtatgtttgtgaaaattgtggagacatagcagcacaaatcaagggtattaatacatgtcttagatgttcaaaacttaatctctctcctctcttaacaaaaattgataccacgcacgtatctaaagtatttcttactcaaatgaacgccagaggcgtaaaagtcaaattagatttcgaacgaaggcctccttcgttttataaaccattagataaagttgatctcaagccgtcttttctggtgtaatattctagtttggtagtagatacatatcaatatcatcaaattcgagatccgaattataaaatgggcgtggattgttaactatagaatcggacgtctgatattcgaaaatctgtggagtttcaggttttggtggaggtgtaactgctacttgggatactgaagtctgatattcagaaagctgtggatgttctggttcggcatccaccgatggtgtcacatcactaatcggttcggtaacgtctgtggatggaggtgctacttctacagaacctgtagcctcagttgtcaacggagatacatttttaatgcgagaaaatgtataatttggtaatggtttcttatgtggatctgaagaagaggtaagatatctactagaaagataccgatcacgttctagttctcttttgtagaacttaactttttctttctccgcatctagttgatattccaacctcttcacgttactacgttcagattccaattcacgttcgcatgggttacctccgcagtttttacgagcgatttcacgttcagccttcatgcgtctctccctctctctatcgagtttatcagagcagtctttctgaaggcgatcgaactccataaatttctccaacgctttgattgtttccatagatttccgaagttcagcttttaggactgtgattctttttctttcgaattcacagctggatgtacaaccgtttccattaccgccatctctaagtttcttttctagatcggcaacatttcatccccatgccttttacattcctcgagtctactgtcgtcgaaatatcgttccagctccttttcgacatcaataactttagcacgttgtctctcaagctctcttttgtagttatctgattccctggcacgtttaagatcttcatgcaattgagtcagctcttaacttcctctcttgcttcttcgtcatagtacgcgcaatcactgtgagatccattgttaccacgtctacactcggcgagctcgcgtttaagagattcaatttcccgtttgtattggtccatgtttccattgctaccaccattagatttacaggctgctagttgtcgttcgagatcagaaatacgggttttcttggaattgatttcgtcgatgtacttggcatcgaaacacttattaagttctttttccaattctacgattttatttctttcgcgagtcaattccctcctgtagtaactatctgttttgtcagattcacgctctctacgtagactttcttgcaagttactaatttgttccctagcacgtccgagtttagttttatatgctgaatagagttctgattcatcctttgagcagatctctagcgatcgtttaagattcctaattctagtctttagcctatttacctcctcagaagatgttccgttaccgttgcgtttacactcgttaagctgtctatcaagatccatgattctatctctaagacgttgcatctctctttccatatcagcattgctttcattattacgtctgcagtcactcaactgtctttcaatatctgagattctatctctaagacgtcgcatctctctctgtttcggcattggtttcattattacgtttacagtcgttcaactgtctttcaagatctgatattctagattggagtctgctaatctctgtagcattttcacggcattcactcagttgtctttcaagatctgaaattttagattggagtctgctaatctctgtaagatttcctcctccgctctcgatgcagtcggtcaacttattctctagttctctaatacgcgaacgcagtgcatcaacttcttgcgtgtcttcctggttgcgtgtacattcatcgagatctctaacgcgtcgtcgttcttcctcaagttctctgcgtactacagaaagcgtgtccctatcttgttgatatttagcaatttctgattctagagtactgattttgcttacgtagttactaatagttgtcttggccttatcaagatcctccttgtatttgtcgcattccttgatatccctacgaagtctggacagttcccattcgacattacgacgtttatcgatttcagctcggagatcgtcatcgcgttgttttagccacatacgactgagttcaagttctcgttgacaagatccatctacttttccattcctaatagtatccagttccttttctagttctgaacgcatttctcgttccctatcaagcgattctctcaattctcggatagtcttcttatcaatttctaataaatctgaaccatcatctgtcccattttgaatatccctgtgttctttgatctcttttgtaagtcggtcgattctttcggttttataaacagaatccctttccaaagtcctaatcttactgagtttatcactaagttctgcattcaattcggtgagttttctcttggcttcttccaactctgttttaaactctccactatttccgcattcttcctcgcatttatctaaccattcaattagtttattaataactagttggtaatcagcgattcctatagccgttcttgtaattgtgggaacataattaggatcttctaatggattgtatggcttgatagcatcatctttatcattattagggggatggacaaccttaattggttggtcctcatctcctccagtagcgtgtggttcttcaataccagtgttagtaataggcttaggcaaatgcttgtcgtacgcgggcacttcctcatccatcaagtatttataatcgggttctacttcagaatattcttttctaagagacgcgacttcgggagttagtagaagaactctgtttctgtatctatcaacgctggaatcaatactcaagttaaggatagcgaatacctcatcgtcatcatccgtatcttctgaaacaccatcatatgacatttcatgaagtctaacgtattgataaatagaatcagatttagtattaaacagatccttaacctttttagtaaacgcatatgtatattttagatctccagatttcataatatgatcacatgccttaaatgtcagtgcttccatgatataatctggaacactaatgggtgacgaaaaagatacagcaccatatgctacgttgataaataaatctgaaccactaagtagataatgattaatgttaagaaagaggaaatattcagtgtataggtatgtcttggcgtcatatcttgtactaaacacgctaaacagtttgttaatgtgatcaatttccaatagattaattagagcagcgggaataccaacaaacatattaccacatccgtattttctatgaatatcacatatcatgttaaaaaatcttgatagaagagcgaatatctcgtctgacttaatgagtcgtagttcagcagcaacataagtcataactgtaaatagaacatactttcctgtagtgttgattctagactccacatcaacaccattattaaaaatagttttatatacatctttaatctgctctccgttaatcgtcgaacgttctagtatacggaaacactttgatttcttatctgtagttaatgacttagtgatatcacgaagaatattacgaattacatttcttgtttttcttgagagacctgattcagaactcaactcatcgttccatagtttttctacctcagtggcgaaatctttggagtgcttggtacatttttcaataaggttcgtgacctccatttattataaaaaatttattcaaaacttaactacaatcgggtaattataagatcgtagatctcccatgtggcggaatactaccatctatcgcatgtggatggacagtaggtaatggccatgggaacagtaatgtttgcatatttatctttcttgctagtattactgcatattgtcccaatgtttcgatgtgatgttctaacctatcaactgccgctgtatcacaacaatagtgtccgatgaaattaagattatgatccaatgtgtttaatatatgattatcaagtcttatacgatccgcgtcttttttgacaggatcaggttcttctacaggaagaagtttcggcctcttatgatattcatgtctgggaaacggtggtctagggtgaggctccggtatcggagtgggttttggattataatcatcatcgtctatgacatcatcttcgacttcgatatttattttgctatcttgatgatgtcctgtatcagttgcattttcagcactcgactgaatattagcgcattcattgtctattattaccatatttctaaacccaaaatgtatgtgttgaacatcagtactatcgttgatgagtcttatagcatgaattcgcttatcgttatcgggtttatcttctgtcaccttagcaattccttttttattaaactctacataatcatatccatttctattgtttgttctaatataaacgagtatagcatcattgctaaatttttcaatagtatcaaaaacagaatatcctaaaccatataatatatattcaggaacactcaaactaaatgtccaggattctcctaaatacgtaaactttaatagtgcgaaatcattcaaaaatctaccacttatagatagatagtacataaatgcgtatagtagtctacctatctctttattatgaaaaccggcattacgatcatatatgtcgtgatatacctgtgatccgtttacgttaaaccataaatacatgggtgatcctataaacatgaatttatttctaattctcagagctatagttaattgaccgtgtaatatttgcttacatgcatacttgatacgcttattaataagatttttatcattgctcgttatttcagaatcgtatatataaggagtaccatcgtgattcttaccagatattatacaaaatactatatataaaatatattgacccacgttagtaatcatataaatgtttaacgttttaaattttgtattcaatgatccattatcatacgctatcatggtcttgtaatattcattctttaaaatataatattgtgttagccattgcattggagctcctaatggagattttctattctcatccattttaggataggctttcataaagtccctaataacttcgtgaataatgtttctatgttttctactgatgcatgtatttgcttcgatttttttatcccatgtttcatctatcatagatttaaacgcagtaatgctcgcaacattaacatcttgaaccgttggtacaattccgttccataaatttataatgttcgccatttatataactcattttttgaatatacttttaattaacaaaagagttaagttactcatatggacgccgtccagtctgaacatcaatctttttagccagagatatcatagccgctcttagagtttcagcgtgattttccaacctaaatagaacttcatcgttgcgtttacaacacttttctatttgttcaaactttgttgttacattagtaatctttttttccaaattagttagccgttgtttgagagtttcctcattgtcgtcttcatcggctttaacaattgcttcgcgtttagcctctggctttttagcagcctttgtagaaaaaaattcagttgctggaattgcaagatcgtcatctccggggaaaagagttccgtccatttaaagtacagattttagaaactgacactctgcgttatttatatttggtacaacacatggattataaatattgatgttaataacatcagaaaatgtaaagtctatacattgttgcatcgtgttaaattttctaatggatctagtattattgggtccaacttctgcctgaaatccaaatatggaagcggatacaaaaccgtttcctggataaaccacacatctccacttttgctttacatcagaaattgtgtcgttgacatcttgaactctcctatctaatgccggtgttccacctatagattttgaatattcgaatgctgcatgagtagcattaaattccttaatattgccataattttcatatattgagtaaccctggataaaaagtaaacacaccgcagccgtcgctaccacaataaaaaaaattgatagagagttcatttataatctattagaagctgacaaaatttttttacacgcatcagacaatgctttaataaatagttcaacatctacttttgtcatatcgaaccgatggtatgattctaacctagaattacatccgaaaaagttgactatgttcatagtcattaagtcattaacaaacaacattccagactctggattataagacgatactgtttcgtcacaattacctaccttaatcatgtgattatgaatattggctattagagcaccttctaagaaatctataatatctttgaaacacgatttaaaatcaaaccacgaatatacttctacgaagaaagttagtttacccataggagaaataactataaatggagatctaaatacaaaatccggatctatgatagttttaacattattatattctctattaaatacctccacatctaaaaatgttaattttgaaactatgtcttcgtttattaccgtacctgaactaaacgctataagctctattgtttgagaactctttaaacgatattcttgaaatacatgtaacaaagtttcctttaactcggtcggtttatctaccatagttacagaatttgtatccttatctataatataataatcaaaatcgtataaagttatataattatcgcgttcagattgtgatcttttcaaatagactaaaaaccccatttctctagtaagtatcttatgtatatgtttgtaaaatatcttcatggtgggaatatgctctaccgcagttagccattcctcattgacagcggtagatgtattagacaaaactattccaatgtttaacaagggccattttacgagattattaaatccttgtttgataaatgtagccaatgagggttcgagttcaacgacgattgaattctcttcccgcggatgctgcatgatgaacgacgggatgttgttcgattgatttggaattctttttcgactttttgtttatattaaatattttaaaatttatagcggatagcaattcatgtaccacggataatgtagacgcgtattgcgcatcgatatctttattattagataaatttatcaataaatgtgagaagtttgcctcgttaaggtcttccatttaaatattatataaacatttgtgtttgtatcttattcgtcttttatggaatagttttttactagtaaagctgcaattacacactttgtccgtaaaacataaatataaacaccagcttttatcaatcgttccaaaaagtcgacggcggacatttttaacatggcatctattttaaatacacttaggtttttggaaaaaacatcattttataattgtaacgattcaataactaaagaaaagattaagattaaacataagggaatgtcatttgtattttataagccaaagcattctaccgttgttaaatacttgtctggaggaggtatatatcatgatgatttggttgtattggggaaggtaacaattaataatctaaagatgatgctattttacatggatttatcatatcatggagtgacaagtagtggagcaatttacaaattgggatcgtctatcgatagactttctctaaataggactattgttacaaaagttaataattatgatgatacattttttgacgacgatgattgatcgctattgcacaattttgtttttgtactttctaatatagtgtttaggttctttttcatatgagaatattgatttactaaaatatctatgtttaacttttgttctatgacgtccttatcggcggtatcggtacatatacgtaattcaccttcacaaaatacggagtcttcgataataatagccaatcgattattggatctagctgtctgtatcatattcaacatgtttaatatatcctttcgtttcccctttacaggcatcgatcgtagcatattttccgcgtctgatatggaaatgttaaaactacaaaaatgcgtaatgttagcccgtcctaatattggtacgtgtctataagtttggcatagtagaataatagacgtgtttaaatgccttccaaagtttaagaattctattagagtattgcattttgatagtttatcgcctacatcatcaaaaataagtaaaaagtgtgctgattttttatgattttgtgcgacagcaatacatttttctatgttacttttagttcgtatcagattatattctagagattcctgactactaacgaaattaatatgatttggccaaatgtatccatcataatctgggttataaacgggtgtaaacaagaatatatgtttatattttttaactagtgtagaaaacagagatagtaaatagatagtttttccagatccagatcctcctgttaaaaccattctaaacggcatttttaataaattttctcttgaaaattgtttttcttggaaacaattcataattatatttacagttactaaattaatttgataataaatcaaaatatggaaaactaaggttgttagtagggaggagaacaaagaaggcacatcgtgatataaataacatttattatcatgatgacaccagaaaacgacgaagagcagacatctgtgttctccgctactgtttacggagacaaaattcagggaaagaataaacgcaaacgcgtgattggtctatgtattagaatatctatggttatttcactactatctatgattaccatgtccgcgtttctcatagtgcgcctaaatcaatgcatgtctgctaacgaggctgctattactgacgccgctgttgccgttgctgctgcatcatctactcatagaaaggttgcgtctagcactacacaatatgatcacaaagaaagctgtaatggtttatattaccagggttcttgttatatattacattcagactaccagttattctcggatgctaaagcaaattgcactgcggaatcatcaacactacccaataaatccgatgtcttgactacctggctcattgattatgttgaggatacatggggatctgatggtaatccaattacaaaaactacatccgattatcaagattctgatgtatcacaagaagttagaaagtatttttgtgttaaaacaatgaactaatatttatttttgtacattaataaatgaaatcgcttaatagacaaactgtaagtaggtttaagaagttgtcggtgccggccgctataatgatgatactctcaaccattattagtggcataggaacatttctgcattacaaagaagaactgatgcctagtgcttgcgccaatggatggatacaatacgataaacattgttatttagatactaacattaaaatgtctacagataatgcggtttatcagtgtcgtaaattacgagctagattgcctagacctgatactagacatctgagagtattgtttagtattttttataaagattattgggtaagtttaaaaaagaccaatgataaatggttagatattaataatgataaagatatagatattagtaaattaacaaattttaaacaactaaacagtacgacggatgctgaagcgtgttatatatacaagtctggaaaactggttaaaacagtatgtaaaagtactcaatctgtactatgtgttaaaaaattctacaagtgacaacaaaaaatgaattaataataagtcgttaacgtacgccgccatggacgccgcgtttgttattactccaatgggtgtgttgactataacagatacattgtatgatgatctcgatatctcaatcatggactttataggaccatacattataggtaacataaaaactgtccaaatagatgtacgggatataaaatattccgacatgcaaaaatgctactttagctataagggtaaaatagttcctcaggattctaatgatttggctagattcaacatttatagcatttgtgccgcatacagatcaaaaaataccatcatcatagcatgcgactatgatatcatgttagatatagaagataaacatcagccattttatctattcccatctattgatgtttttaacgctacaatcatagaagcgtataacctgtatacagctggagattatcatctaatcatcaatccttcagataatctgaaaatgaaattgtcgtttaattcttcattctgcatatcagacggcaatggatggatcataattgatgggaaatgcaatagtaattttttatcataaaagttgtaaagtaaataataaaacaataaatattgaactagtagtacgtatattgagcaatcagaaatgatgctggtacctcttatcacggtgaccgtagttgcgggaacaatattagtatgttatatattatatatttgtaggaaaaagatacgtactgtctataatgacaataaaattatcatgacaaaattaaaaaagataaagagttctaattccagcaaatctagtaaatcaactgatagcgaatcagactgggaggatcactgtagtgctatggaacaaaacaatgacgtagataatatttctaggaatgagatattggacgatgatagcttcgctggtagtttaatatgggataacgaatccaatgttatggcgcctagcacagaacacatttacgatagtgttgctggaagcacgctgctaataaataatgatcgtaatgaacagactatttatcagaacactacagtagtaattaatgaaacggagactgttgaagtacttaatgaagataccaaacagaatcctaactattcatccaatcctttcgtaaattataataaaaccagtatttgtagcaagtcaaatccgtttattacagaacttaacaataaatttagtgagaataatccgtttagacgagcacatagcgatgattatcttaataagcaagaacaagatcatgaacacgatgatatagaatcatcggtcgtatcattggtgtgattagtttcctttttataaaattgaagtaatatttagtattattgctgccgtcacgttgtacaaatggagatattccctgtattcggcatttctaaaattagcaattttattgctaataatgactgtagatattatatagatacagaacatcaaaaaattatatctgatgagatcaatagacagatggatgaaacggtacttcttaccaacatcttaagcgtagaagttgtaaatgacaatgagatgtaccatcttattcctcatagattatcgacgattatactctgtattagttctgtcggaggatgtgttatctctatagataatgacatcaatggcaaaaatattctaacctttcccattgatcatgctgtaatcatatccccactgagtaaatgtgtcgtagttagcaagggtcctacaaccatattggttgttaaagcggatatacctagcaaacgattggtaacatcgtttacaaacgacatactatatgtaaacaatctgtcactgattaattatttgccgttgtctgtattcattattagacgagtcaccgactatttggatagacacatatgcgatcagatatttgctaataataagtggtattcccttataaccatcgacgataagcaatatcctattccatcaaactgtataggtatgtcctctgccaagtacataaattctagcatcgagcaagatactttaatccatgtttgtaacctcgagcatccgttcgactcagtatacaaaaaaatgcagtcgtacaattctctacctatcaaggaacaaatattgtacggtagaattgataatataaatatgagcattagtatttctgtggattaatagatttctagtatggggatcattaatcatctctaatctctaaatacctcataaaacgaaaaaaaagctattatcaaatactgtacggaatggattcattctcttctctttttatgaaactctgttgtatatctactgataaaactggaagcaaaaaatctgatagaaagaataagaataagatcaaggattatatggaacacgattattataaaataacaatagttcctggttcctcttccacgtctactagctcgtggtattatacacatgcctagtaatagtctctttgcgttgacggaaagcagactagaaataacaggctaaaatgttcagacaccataatagttcccaacccagataataacagagttccatcaacacattcctttaaactcaatcccaaacccaaaaccgttaaaatgtatccggccaattgatagtagataatgaggtgtacagcgcatgataatttacacagtaaccaaaatgaaaatactttagtaattataagaaatatagacggtaatgtcatcatcaacaatccgataatatgcctgagagtaaacattgacggataaaacaaaaatgctccgcataactctatcatggcaataacacaaccaaatacttgtaagattcctaaattagtagaaaatacaacgaatatcgatgtataagtgatctcgagaaataataagaataaagtaatgcccgtaaagataaacatcaacattgtttggtaatcattaaaccaattagtatgaagttgaactaatttcacagtagattttattccagtgttatcctcgcatgtataagtacctggtaagatatctttatattccataatcaatgagacatcactatctgataacgaatgaagtctagcactagtatgccatttacttaatattgtcgtcttggaagttttattataagttaaaatatcatggttatccaatttccatctaatatactttgtcggattatctatagtacacggaataatgatggtatcattacatgctgtatactctatggtctttgtagttgttataacaaccaacgtatagaggtatatcaacgatattctaactcttgacattttttatttatttaaaatgatacctttgttatttattttattctattttgctaacggtattgaatggcataagtttgaaacgagtgaagaaataatttctacttacttattagacgacgtattatacacgggtgttaatggggcggtatacacattttcaaataataaactaaacaaaactggtttaactaataataattatataacaacatctataaaagtagaggatgcggataaggatacattagtatgcggaaccaataacggaaatcccaaatgttggaaaatagacggttcagacgacccaaaacatagaggtagaggatacgctccttatcaaaatagcaaagtaacgataatcagtcacaacggatgtgtactatctgacataaacatatcaaaagaaggaattaaacgatggagaagatttgacggaccatgtggttatgatttattcacggcggataacgtaattccaaaagatggtttacgaggagcattcgtcgataaagacggtacttatgacaaagtttacattcttttcactgatactatcggctcaaagagaattgtcaaaattccgtatatagcacaaatgtgcctaaacgacgaaggtggtccatcatcattgtctagtcatagatggtcgacgtttctcaaagtcgaattagaatgtgatatcgacggaagaagttatagacaaattattcattctagaactataaaaacagataatgatacgatactatatgtattcttcgatagtccttattccaagtccgcattatgtacctattctatgaataccattaaacaatctttttctacgtcaaaattggaaggatatacaaagcaattgccgtctccagctcctggtatatgtttaccagctggaaaagttgttccacataccacgtttgaagtcatagaacaatataatgtactagatgatattataaagcctttatctaaccaacctatcttcgaaggaccgtctggtgttaaatggttcgatataaaggagaaggaaaatgaacatcgggaatatagaatatacttcataaaagaaaattctatatattcgttcgatacaaaatctaaacaaactcgtagctcgcaagtcgatgcgcgactattttcagtaatggtaactgcgaaaccgttatttatagcagatatagggataggagtaggaatgccacaaatgaaaaaaatacttaaaatgtaatcttaatcgagtacaccacacgacaatgaacaaacataagacagattatgctggttatgcttgctgcgtaatatgcggtctaattgtcggaattatttttacagcgacactattaaaagttgtagaacgtaaattagttcatacaccattaatagataaaacgataaaagatgcatatattagagaagattgtcctactgactggataagctataataataaatgtatccatttatctactgatcgaaaaacctgggaggaaggacgtaatgcatgcaaagctctaaattcaaattcggatctaattaagatagagactccaaacgagttaagttttttaagaagccttagacgaggctattgggtaggagaatccgaaatattaaaccagacaaccccatataattttatagctaagaatgccacgaagaatggaactaaaaaacggaaatatatttgtagcacaacgaatactcccaaactgcattcgtgttacactatataacaattacactacatttttatcataccactacttcggttagatgttttagaaaaaaataaatatcgccgtaccgttcttgtttttataaaaataacaattaacaattatcaaattttttctttaatattttacgtggttgaccattcttggtggtaaaataatctcttagtgttggaatggaatgctgtttaatgtttccacactcatcgtatattttgacgtatgtagtcacatcgtttacgcaatagtcagactgtagttctatcatgcttcctacatcagaaggaggaacagttttaaagtctcttggttttaatctattaccgttagttttcatgaaatcctttgttttatccacttcacattttaaataaatgtccactatacattcttttgttaattttactagatcgtcatgggtcatagaatttataggttccgtagtccatggatccaaactagcaaacttcgcgtatacggtatcgcgattagtgtatacaccaactgtatgaaaattaagaaaacagtttaataaatcaacagaaatatttaatcctccgtttgatacagatgcgccatatttatggatttcggattcacacgttgtttgtctgaggtgttcgtctagtgttgcttctacgtaaacttcgattcccatatattctttattgtcagaatcgcataccgatttatcatcatacactgtttgaaaactaaatggtatacacatcaaaataataaataataacgagtacattctgcaatattgttatcgtaattggaaaaatagtgttcgagtgagttggattatgtgagtattggattgtatattttattttatattttgtaataagaataaaatgctaatgtcaagtttattccaatagatgtcttattaaaaacatatataataaataacaatggctgaatggcataaaattatcgaggatatctcaaaaaataataagttcgaggatgccgccatcgttgattacaagactacaaagaatgttctagctgctattcctaacagaacatttgccaagattaatccgggtgaaattattcctctcatcactaatcgtaatattctaaaacctcttattggtcagaaatattgtattgtatatactaactctctaatggatgagaacacgtatgctatggagttgcttactgggtacgcccctgtatctccgatcgttatagcgagaactcataccgcacttatatttttgatgggtaagccaacaacatccagacgtgacgtgtatagaacgtgtagagatcacgctacccgtgtacgtgcaactggtaattaaaataaaaagtaatattcatatgtagtgtcaattttaaatgatgatgatgaaatggataatatccatattgacgatgtcaataatgccggtattggcatacagttcatcgatttttagatttcattcagaggatgtggaattatgttatgggcatttgtattttgataggatctataatgtagtaaatataaaatataatccgcatattccatatagatataattttattaatcgcacgttaaccgtagatgaactagacgataatgtcttttttacacatggttattttttaaaacacaaatatggttcacttaatcctagtttgattgtctcattatcaggaaacttaaaatataatgatatacaatgctcagtaaatgtatcgtgtctcattaaaaatttggcaacgagtacatctactatattaacatctaaacataagacttattctctacatcggtccacgtgtattactataataggatacgattctattatatggtataaagatataaatgacaagtataatgacatctatgattttactgcaatatgtatgctaatagcgtctacattgatagtgaccatatacgtgtttaaaaaaataaaaatgaactcttaattatgctatgctattagaaatggataaaatcaaaattacggttgattcaaaaattggtaatgttgttaccatatcgtataacttggaaaagataactattgatgtcacacctaaaaagaaaaaagaaaaggatgtattattagcgcaatcagttgctgtcgaagaggcaaaagatgtcaaggtagaagaaaaaaatattatcgatattgaagatgacgatgatatggatgtagaaagcgcgtaatacgatctataaaaataagtatataaatactttttatttactgtactcttactgtgtagtggtgataccctactcgattatttttttaaaaaaaaaatacttattctgattcttctagccatttccgtgttcgtttgaatgccacatcgacgtcaaagataggggagtagttgaaatctagttctgcattgttggtacgcacctcaaatgtagtgttggatatcttcaacgtatagttgttgagtagtgatggttttctaaatagaattctcttcatatcattcttgcacgcgtacatttttagcatccatcttggaatcctagatccttgttctattcccaatggtttcatcaatagaagattaaacatatcgtacgaacacgatggagagtaatcgtagcaaaagtaagcatttcctttaatcttagatcccggatactggatatattttgcagccaacacgtgcatccatgcagcatttcctacatatacccggctatgcaccgcgtcatcatcgactgtacgatacataatgttaccgtgttgcttacattgctcgtaaaagactttcatcaatttgtctccttctccgtaaattccagtgggtcttaggcaacaagtatacaattttgctccattcatgattacggaattattggctttcataaccagttgctcggccatacgtttactttttgcgtatacatgtcctggtgatatatcataaagggtatgctcatggccgatgaatggatcaccgtgtttattgggtcctattgcttccatgctactagtatagatcaaatacttgattcctaggtccacacaagctgccaaaatagtctgtgttccataatagtttactttcatgatttcattatcggtgtattttccaaatacatccactagagcagccgtatgaataatcagatttaccccatctagcgcttctctcaccttatcaaagtcgtttatatcacattgtatatagtttataaccttaactttcgaggttattggttgtggatcttctacaatatctatgactctgatttcttgaacatcatctgcactaattaacagttttactatatacctgcctagaaatccggcaccaccagtaaccgcgtacacggccattgctgccactcataatatcagactacttattctattttactaaataatggctgtttgtataatagaccacgataatatcagaggagttatttactttgaaccagtccatggaaaagataaagttttaggatcagttattggattaaaatccggaacgtatagtttgataattcatcgttacggagatattagtcaaggatgtgattccataggcagtccagaaatatttatcggtaacatctttgtaaacagatatggtgtagcatatgtttatttagatacagatgtaaatatatttacaattattggaaaggcgttatctatttcaaaaaatgatcagagattagcgtgtggagttattggtatttcttacataaatgaaaagataatacattttcttacaattaacgagaatggcgtttgatatatcagttaatgcgtctaaaacaataaatgcattagtttacttttctactcagcaaaataaattagtcatacgtaatgaagttaatgatacacactacactgtcgaatttgatagggacaaagtagttgacacgtttatttcatataatagacataatgacaccatagagataagaggggtgcttccagaggaaactaatattggttgcgcggttagtatgacttacttgtataataagtatagttttaaactgattttagcagaatatataagacacagaaatactatatccggcaatatttattcggcattgatgacactagatgatttggctattaaacagtatggagacattgatctattatttaatgagaaacttaaagtagactccgattcgggactatttgactttgtcaactttgtaaaggatatgatatgttgtgattctagaatagtagtagctctatctagtctagtatctaaacattgggaattgacaaataaaaaatataggtgtatggcattagccgaacatatatctgatagtattccaatatctgagctatctagactacgatacaatctatgtaagtatctacgcggacacactgagagcatagaggataaatttgattattttgaagacgatgattcgtctacatgttctgccgtaaccgacagggaaacggatgtataattttttttatagcgtgaaggatatgataaaaaatataattgttgtatttatcccattccaatcaccttatatgattctgtaacacaataaaggagtcttatagatgtatagaggtcagatactggtttgataaactgtttattccacataagtatgtttgactttatggttagacccgcatactttaacaaatcactgaaaattggagttaggtattgacctctcagaatcagttgccgttctggaacattaaatgtattttttatgatatactccaacgcatttatgtgggcatacaacaagtcattactaatggaatattccaagagttttagttgtctagtatttaacaagagaagagatttcaacagactgtttatgaactcgaatgccgcctcattgtcgcttatattgatgatgtcgaattctcccaatatcatcaccgatgagtagctcatcttgttatcgggatccaagttttctaaagatgtcattaaaccctcgatcatgaatggatttatcatcatcgtttttatgttggacatgagcttagtccgtttgtccacatctatagaagatgatttctgaattatttcatatatctctctctttaactccaggaacttgtcaggatggtctactttaatatgttctcgtctaagagatgaaaatctttggatggttgcacgcgacttttctctaaaggatgacgttgcccaagatcctctcttaaatgaatccatcttatccttggacaagatggacagtctattttccttagatggtttaatatttttgttacccatgatctataaaggtagacctaatcgtctcggatgaccatatatttattttcagttttattatacgcataaattgtaaaaaatatgttaggtttacgaaaatgtctcgtggggcattaatcgtttttgaaggattggacaaatctggaaaaacaacacaatgtatgaacatcatggaatcaataccttcaaacacaataaaataccttaactttcctcagagatccactgtcactggaaagatgatagatgactatctaactcgtaaaaaaacctataatgatcatatagttaatctattattttgtgcaaatagatgggagtttgcatcttttatacaagaacaactagaacagggaattactttaatagttgatagatacgcattttctggagtagcgtatgccgccgctaaaggcgcgtcaatgactctcagtaagagttatgaatctggattgcctaaacccgacttagttatattcttggaatctggtagcaaagaaattaatagaaacgtcggtgaggaaatttatgaagatgttacattccaacaaaaggtattacaagaatataaaaaaatgattgaagaaggagatattcattggcaaattatttcttctgaattcgaggaagatgtaaagaaggagttgattaagaatatagttatagaggctatacacacggttactggaccagtggggcaactgtggatgtaatagtgaaattacattttttataaatagatgttagtacagtgttataaatggatgaagcatattactctggcaacttggaatcagtactcggatacgtgtccgatatgcataccgaactcgcatcaatatctcaattagttattgccaagatagaaactatagataatgatatattaaacaaggacattgtaaattttatcatgtgtagatcaaacttggataatccatttatctctttcctagatactgtatatactattatagatcaagagaactatcagactgagttgattaattcattagacgacaatgaaattatcgattgtatagttaataagtttatgagcttttataaggataacctagaaaatatagtagatgctatcattactctaaaatatataatgaataatccagattttaaaactacgtatgccgaagtactcggttccagaatagccgatatagatattaaacaagtgatacgtaagaatatactacaattgtctaataatatccgcgaacgatatttgtgaaaatattaaaaaaaaatactttttttattaaatgacgtcttttcgtgaatttagaaaattatgctgtgctatatatcacgcatcaggatataaagaaaaatctaaattaattagagactttataacagatagggatgataaatatttgatcattaagctattgcttcccggattagacgatagaatttataacatgaacgataaacaaattataaaattatatagtataatatttaaacaatctcaggaagatatgctacaagatttaggatacggatatataggagacactattaggactttcttcaaagagaacacagaaatccgtccacgagataaaagcattttaactttagaagaagtggatagttttttaactacgttatcatccgtaactaaagaatcgcatcaaataaaattattgactgatgtagcatctgtttgtacatgtaatgatttaaaatgtgtagtcatgcttattgataaagatctaaaaattaaagcgggtcctcggtacgtacttaacgctattagtcctaatgcctatgatgtgtttagaaaatctaataacttgaaagagataatagaaaattcatctaaacaaaatctagactctatatctatttctgttatgactccaattaatcccatgttagcggaatcgtgtgattctgtcaataaggcgtttaaaaaatttccatcaggaatgtttgcggaagtcaaatacgatggtgaaagagtacaagttcataaaaataataacgagtttgccttctttagtagaaacatgaaaccagtactctctcataaagtggattatctcaaagaatacataccgaaagcatttaaaaaagctacgtctatcgtattggattctgaaattgttcttgtagacgaacataatgtaccgctcccgtttggaagtttaggtatacacaaaaagaaagaatataaaaactctaacatgtgtttgttcgtgtttgactgtttgtactttgatggattcgatatgacggacattccattgtacgaacgaagatcttttctcaaagatgttatggttgaaatacccaatagaatagtattctcagagttgacgaatattagtaacgagtctcagttaactgacgtattggatgatgcactaacgagaaaattagaaggattggtcttaaaagatattaatggagtatacgaaccgggaaagagaagatggttaaaaataaagcgagactatttgaacgagggttccatggcagattctgccgatttagtagtactaggtgcctactatggtaaaggagcaaagggtggtatcatggcagtctttctaatgggttgttacgacgatgaatccggtaaatggaagacggttaccaagtgttcaggacacgatgataatacgttaagggagttgcaagaccaattaaagatgattaaaattaacaaggatcccaaaaaaattccagagtggttagtagttaataaaatctatattcccgattttgtagtagaggatccgaaacaatctcagatatgggaaatttcaggagcagagtttacatcttccaagtcccataccgcaaatggaatatccattagatttcctagatttactaggataagagaggataaaacgtggaaagaatctactcatctaaacgatttagtaaacttgactaaatcttaatagttacatacaaactgaaaattaaaataacactatttagttggtggtcgccatggatggtgttattgtatactgtctaaacgcgctagtaaaacatggcgaggaaataaatcatataaaaaatgatttcatgattaaaccatgttgtgaaagagtttgtgaaaaagtcaagaacgttcacattggcggacaatctaaaaacaatacagtgattgcagatttgccatatatggataatgcggtatccgatgtatgcaattcactgtataaaaagaatgtatcaagaatatccagatttgctaatttgataaagatagatgacgatgacaagactcctactggtgtatataattattttaaacctaaagatgccattcctgttatcatatctataggaaaggataaagatgtctgtgaactattaatctcatcagacatatcgtgtgcatgcgtggagttaaattcatatcacgtagccattcttcccatggatgtttccttttttaccaaaggaaatgcatcattgattattctcctgtttgatttctctatcgatgcggcacctctcttaagaagtgtaaccgataataatgttattatatctagacaccagcgtctacatgacgagcttccgagttccaattggttcaagttttacataagtataaagtccgactattgttctatattatatatggttgttgatggatctgtgatgcatgcgatagctgataatagaactcacgcaattattagcaaaaatatattagacaatactacgattaacgatgagtgtagatgctgttattttgaaccacagattaggattcttgatagagatgagatgctcaatggatcatcgtgtgatatgaacagacattgtattatgatgaatttacctgatgtaggcgaatttggatctagtatgttggggaaatatgaacctgacatgattaagattgctctttcggtggctggtaatttaataagaaatcgagactacattcccgggagacgaggatatagctactacgtttacggtatagcctctagataatttttttaagcacgaaataaaaaacataattttaaaccaatctatttcatactattttgtgtgatcaccatggacataaagatagatattagtatttctggtgataaatttacggtgactactaggagggaaaatgaagaaagaaaaaaatatctacctctccaaaaagaaaaaactactgatgttatcaaacctgattatcttgagtacgatgacttgttagatagagatgagatgtttactattctagaggaatattttatgtacagaggtctattaggcctcagaataaaatatggacgactctttaacgaaattaaaaaattcgacaatgatgcggaagaacaattcggtactatagaagaactcaagcagaaacttagattaaattctgaagagggagcagataactttatagattatataaaggtacaaaaacaggatatcgtcaaacttactgtatacgattgcatatctatgataggattgtgtgcatgcgtggtagatgtttggagaaatgagaaactgttttctagatggaaatattgtttacgagcgattaaactgtttattgatgatcacatgcttgataagataaaatctatactgcagaatagactagtatatgtggaaatgtcatagaaagttaaaagttaatgagagcaaaaatatataaggttgtattccatatttgttatttttttctgtaatagttagaaaaatacattcgatggtctatctatcagattattatgtgttataaggtactttttctcataataaactagagtatgagtaagatagtgtttttcaaaacatataaatctaaaattgatggatgagatatacagctattaatttcgaaaatatattttaatctgataactttaaacatggatttttaatggtggtttaacgttttaaaaaaagattttgttattgtagtatatgataatattaaaagatggatataaagaatttgctgactgcatgtactattttttacattactacattggctacggcagatatacctacttcgtcactgccacacgctccggtaaacggggcatgtgacgagggagaatatcttgataagaggcataatcaatgttgtaatcagtgtccacctggagaatttgccaaggttagatgtaatggtaacgataacacaaaatgtgaacgctgcccacctcatacatataccgcaatccccaattactctaatggatgtcatcaatgtagaaaatgcccaacaggatcatttgataaggtaaagtgtaccggaacacagaacagtaaatgttcgtgtcttcctggttggtattgcgctactgattcttcacagactgaagattgtcgagattgtataccaaaaaggagatgtccatgcggatactttggtggaatagatgaacaaggaaatcctatttgtaaatcgtgttgtgttggtgaatattgcgactacctacgtaattatagacttgatccatttcctccatgcaaactatctaaatgtaattaattatgattttgatgataatgttaccatacattatatcgctacttggttagtgtattattcagtatgaagacctattaataattacttatcttttgacgatcttgttataattataatataaaaatacttatggcatagtaactcataattgctgacgcgataaattcgtaataatctgttttgttcaaatttttataaggaatctacaggcataaaaataaaaatataatttataatatactcttacagcgcgccatcatgaataacagcagtgaattgattgctgttattaatggatttagaaatagtggacgattttgtgatattaatatagttattaatgatgaaaggataaacgctcacagactcatcctatctggagcctccgaatatttttccattctgttttccaataattttatcgattctaatgaatacgaagttaatctaagtcatttagattatcaaagtgttaacgatttgatcgattacatttatgggatacctttgagcctaactaacgataacgtgaaatatattctttcaaccgctgattttttacaaattggatctgctattacggagtgtgaaaattacatacttaaaaatctttgttctagaaactgtatcgatttctacatatacgctgataaatataataacaagaaaatagaatcagcgtcgtttaacacaatattacaaaatattttgagactcatcaacgatgaaaactttaaatacttaacagaggaatcaatgataaaaattttaagcgatgatatgttaaatataaaaaatgaggatttcgccccactaattctcattaaatggttagagagtactcaacaaccatgcaccgtcgagttacttaaatgcctcagaatatcattgctttccccacaagttataaaatcactttatagtcatcgactggttagttcaatctacgaatgtataacattcttaaacaatatagcattcttggatgaatcatttcctagataccatagcatcgagttgatatctatcggtataagtaattcgcatgataagatttccataaactgctacaatcataaaaaaaatacatgggaaatgatatcttcacgtagatataggtgtagtttcgcagtggccgtcctggataatattatctatatgatgggtggatatgatcagtccccgtatagaagttcaaaggttatagcgtacaatacatgtacaaattcttggatatatgatataccagagctaaaatatcctcgttctaattgtgggggactggctgatgacgaatacatttattgtataggcggcatacgcgatcaggattcatcgttgacatctagtattgatagatggaagccatcaaaaccatattggcagaagtatgctaaaatgcgcgaaccaaaatgtgatatgggggttgcgatgttaaacggattaatatatgttataggtggaatcgttaaaggtgacacgtgtaccgacgcactagagagtttatcagaagatggatggatgaagcatcaacgtcttccaataaaaatgtccaatatgtcgacgattgttcatgatggcaagatttatatatctggaggttacaacaatagtagtgtagttaatgtaatatcgaatctagtccttagctataattcgatatatgatgaatggaccaaattatcatcattaaacattcctagaattaatcccgctctatggtcagcgcataataaattatatgtaggaggaggaatatctgatgatgttcgaactaatacatctgaaacatacgacaaagaaaaagattgttggacattggataatggtcacgtgttaccacgcaattatataatgtataaatgcgaaccgattaaacataaatatccattggaaaaaacacagtacacgaatgattttctaaagtatttggaaagttttataggtagttgatagaacaaaatacataattttgtaaaaataaatcactttttatactaatatgacacgattaccaatacttttgttactaatatcattagtatacgctacaccttttcctcagacatctaaaaaaataggtgatgatgcaactctatcatgtaatcgaaataatacaaatgactacgttgttatgagtgcttggtataaggagcccaattccattattcttttagctgctaaaagcgacgtcttgtattttgataattataccaaggataaaatatcttacgactctccatacgatgatctagttacaactatcacaattaaatcattgactgctagagatgccggtacttatgtatgtgcattctttatgacatcgcctacaaatgacactgataaagtagattatgaagaatactccacagagttgattgtaaatacagatagtgaatcgactatagacataatactatctggatctacacattcaccggaaactagttctgagaaacctgattatatagataattctaattgctcgtcggtattcgaaatcgcgactccggaaccaattactgataatgtagaagatcatacagacaccgtcacatacactagtgatagcattaatacagtaagtgcatcatctggagaatccacaacagacgagactccggaaccaattactgataaagaagaagatcatacagttacagacactgtctcatacactacagtaagtacatcatctggaattgtcactactaaatcaaccaccgatgatacgtacaatgataatgatacagtaccaccaactactgtaggcggtagtacaacctctattagcaattataaaaccaaggactttgtagaaatatttggtattaccgcattaattatattgtcggccgtggcaatattctgtattacgtattatatatgtaataaacgttcacgtaaatacaaaacagagaacaaagtctagatttttgacttacataaatgtctgggatagtaaaatctatcatattgagcgggccatctggtttaggaaagacagccatagccaaaagactatgggaatatatttggatttgtggtgtcccataccactagatttcctcgtcctatggaacgagaaggtgtcgattaccattacgttaacagagaggccatctggaagggaatagccgccggaaactttctagaacatactgagtttttaggaaatatttacggaacttctaaaactgctgtgaatacagcggctattaataatcgtatttgtgtgatggatctaaacatcgatggcgttagaagtcttaaaaatacgtacctaatgccttactcggtgtatataagacctacctctcttaaaatggttgagaccaagcttcgttgtagaaacactgaagcggatgatgagattcatcgtcgtgtgatgttggcaaaaactgacatggatgaggcaggtgaagccggtctattcgacactattatcattgaagatgatgtgaatttagcatatagtaagttaattcagatactacaggaccgtattagaatgtattttaacactaattagagacttaagacttaaaacttgataattaataatataactcgtttttatatgtgtctatttcaacgtctaatgtattagttaaatattaaaacttaccacgtaaaacttaaaatttaaaatgatatttcattgacagatagatcacacattatgaactttcaaggacttgtgttaactgacaattgcaaaaatcaatgggtcgttggaccattaataggaaaaggtggattcggtagtatttatactactaatgacaataattatgtagtaaaaatagagcccaaagctaacggatcattatttaccgaacaggcattttatactagagtacttaaaccatccgttatcgaagaatggaaaaaatctcacaatataaagcacgtaggtcttatcacgtgcaaggcatttggtctatacaaatccattaatgtggaatatcgattcttggtaattaatagattaggtgcagatctagatgcggtgatcagagccaataataatagactaccaaaaaggtcggtgatgttgatcggaatcgaaatcttaaataccatacaatttatgcacgagcaaggatattctcacggagatattaaagcgagtaatatagtcttagatcaaatagataagaataaattatatctagtggattacggattggtttctaaattcatgtctaatggcgaacatgttccatttataagaaatccaaataaaatggataacggtactctagaatttacacctatagattcgcataaaggatacgttgtatctagacgtggagatctagaaacacttggatattgtatgattagatggttgggaggtatcttaccatggactaagatatctgaaacaaagaattgtgcattagtaagtgccacaaaacagaaatatgttaacaatactgcgactttgttaatgaccagtttgcaatatgcacctagagaattgctgcaatatattaccatggtaaactctttgacatattttgaggaacccaattacgacaagtttcggcacatattaatgcagggtgtatattattaagtgtggtgtttggtcgataaaaattaaaaaataacttaatttattattgatctcgtgtgtacaaccgaaatcatggcgatgttttacgcacacgctctcggtgggtacgacgagaatcttcatgcctttcctggaatatcatcgactgttgccaatgatgtcaggaaatattctgttgtgtcagtttataataacaagtatgacattgtaaaagacaaatatatgtggtgttacagtcaggtgaacaagagatatattggagcactgctgcctatgtttgagtgcaatgaatatctacaaattggaaatccgatccatgatcaagaaggaaatcaaatctctatcatcacatatcgccacaaaaactactatgctctaagcggaatcgggtacgagagtctagacttgtgtttggaaggagtagggattcatcatcacgtacttgaaacaggaaacgctgtatatggaaaagttcaacatgattattctactatcaaagagaaggccaaagaaatgagtgcacttagtccaggacctatcatcgattaccacgtctggataggagattgtatctgtcaagttactgctgtggacgtacatggaaaggaaattatgaaaatgagattcaaaaagggtgcggtgcttccgatcccaaatctggtaaaagttaaacttggggagaatgatacagaaaatctttcttctactatatcggcggcaccatcgaggtaaccacctctctggaagacagcgtgaatcatgtactcatgaaacgtttggaaactatacgccatatgtggtctgttgtatatgatcattttgatattgtgaatggtaaagaatgctgttatgtgcatacgcattcatctaatcaaaatcctataccgagtactgtaaaaacaaatttgtacatgaagactatgggatcatgcattcaaatggattccatggaagctctagagtatcttagcgaactgaaggaatcaggtggatggagtcccagaccagaaatgcaggaatttgaatatccagatggagtggaagacactgaatcaattgagagattggcagaggagttcttcaatagatcagaacttcaggctggtgaatcagtcaaatttggtaattctattaattgttaaacatacatctgtttcagctaagcaactaagaacacgtatacggcagcagcttccttctatactctcatcttttaccaacacaaagggtggatatttgttcattggagttgataataatacacacaaagtatttggattcacggtgggttacgactacctcagactgatagagaatgatatagaaaagcatatcaaaagacttcgtgttgtgcatttctgtgagaagaaagaggacatcaagtacgcgtgtcgattcatcaaggtatataaacctggggatgagactacctcgacatacgtgtgcgctatcaaagtggaaagatgctgttgtgctgtgtttgcagattggccagaatcatggtatatggatactaatggtatcaagaagtattctccagatgaatgggtgtcacatataaaattttaattaatgtaactatagagaacaaataataaggttgtaatatcatatagacaataactaacaattaattagtaactgttatctcttttttaactaaccaactaactatatacctattaatacatcgtaattatagttcttaacatctattaatcattaattcgcttctttaattttttataaactaacattgttaattgaaaagggataacatgttacagaatataaattatatatggatttttttaaaaaggaaatacttgactggagtatatatttatctcttcattatatagcacgcgtgttttccaatttttccacatcccatataatacaggattataatctcgttcgaacatacgagaaagtggataaaacaatagttgattttttatctaggttgccaaatttattccatattttagaatatggggaaaatattctacatatttattctatggatgatgctaatacgaatattataattttttttctagatagagtattaaatattaataagaacgggtcatttatacacaatctcgggttatcatcatccattaatataaaagaatatgtatatcaattagttaataatgatcatccagataataggataagactaatgcttgaaaatggacgtagaacaagacattttttgtcctatatatcagatacagttaatatctatatatgtattttaataaatcatggattttatatagatgccgaagacagttacggttgtacattattacatagatgtatatatcactataagaaatcagaatcagaatcatacaatgaattaattaagatattgttaaataatggatcagatgtagataaaaaagatacgtacggaaacacaccttttatcctattatgtaaacacgatatcaacaacgtggaattgtttgagatatgtttagagaatgctaatatagactctgtagactttaatagatatacacctcttcattatgtctcatgtcgtaataaatatgattttgtaaagttattaatttctaaaggagcaaatgttaatgcgcgtaataaattcggaactactccattttattgtggaattatacacggtatctcgcttataaaactatatttggaatcagacacagagttagaaatagataatgaacatatagttcgtcatttaataatttttgatgctgttgaatctttagattatctattatccagaggagttattgatattaactatcgtactatatacaacgaaacatctatttacgacgctgtcagttataatgcgtataatacgttggtctatctattaaacaaaaatggtgattttgagacgattactactagtggatgtacatgtatttcggaagcagtcgcaaacaacaacaaaataataatggaagtactattgtctaaacgaccatctttgaaaattatgatacagtctatgatagcaattactaaacataaacagcataatgcagatttattgaaaatgtgtataaaatatactgcgtgtatgaccgattatgatactcttatagatgtacagtcgctacagcaatataaatggtatattttaagatgtttcgatgaaatagatatcatgaagagatgttatataaaaaataaaactgtattccaattagttttttgtatcaaagacattaatactttaatgagatacggtaaacatccttctttcgtgaaatgcactagtctcgacgtatacggaagtcgtgtacgtaatatcatagcatctattagatatcgtcagagattaattagtctattatccaagaagctggatcctggagataaatggtcgtgttttcctaacgaaataaaatataaaatattggaaaactttaacgataacgaactatccacatatctaaaaatcttataaacattattaaaatataaaatctaagtaggataaaatcacactacatcattgtttccttttagtgctcgacagtgtatactatttttaacgctcataaataaaaatgaaaacgatttccgttgttacgttgttatgcgtactacctgctgttgtttattcaacatgtactgtacccactatgaataacgctaaattaacgtctaccgaaacatcgtttaatgataaccagaaagttacgtttacatgtgatcagggatatcattctttggatccaaatgctgtctgtgaaacagataaatggaaatacgaaaatccatgcaaaaaaatgtgcacagtttctgattatgtctctgaactatataataaaccgctatacgaagtgaattccaccatgacactaagttgcaacggcgaaacaaaatattttcgttgcgaagaaaaaaatggaaatacttcttggaatgatactgttacgtgtcctaatgcggaatgtcaacctcttcaattagaacacggatcgtgtcaaccagttaaagaaaaatactcatttggggaatatatgactatcaactgtgatgttggatatgaggttattggtgcttcgtacataagttgtacagctaattcttggaatgttattccatcatgtcaacaaaaatgtgatatgccgtctctatctaacggattaatttccggatctacattttctatcggtggcgttatacatcttagttgtaaaagtggttttacactaacggggtctccatcatccacatgtatcgacggtaaatggaatcccatactcccaatatgtgtacgaactaacgaaaaatttgatccagtggatgatggtcccgacgatgagacagatttgagcaaactctcgaaagacgttgtacaatatgaacaagaaatagaatcgttagaagcaacttatcatataatcatagtggcgttgacaattatgggcgtcatatttttaatctccgttatagtattagtttgttcctgtgacaaaaataatgaccaatataagttccataaattgctaccgtaaatataaatccgttaaaataattaataatttaataacaaacaagtatcaaaagattaaagacttatagctagaatcaattgagatgtcttcttcagtggatgttgatatctacgatgccgttagagcatttttactcaggcactattataacaagagatttattgtgtatggaagaagtaacgccatattacataatatatacaggctatttacaagatgcgccgttataccgttcgatgatatagtacgtactatgccaaatgaatcacgtgttaaacaatgggtgatggatacacttaatggtataatgatgaatgaacgcgatgtttctgtaagcgttggcaccggaatactattcatggaaatgtttttcgattacaataaaaatagtatcaacaatcaactaatgtatgatataattaatagcgtatctataattctagctaatgagagatatagaagcgcttttaacgacgatggtatatacatccgtagaaatatgattaacaagttgtacggatacgcatctctaactactattggcacgatcgctggaggtgtttgttattatctgttgatgcatctagttagtttgtataaataattatttcaatatactagttaaaattttaagattttaaatgtataaaaaactaataacgtttttatttgtaataggtgcattagcatcctattcgaataatgagtacactccgtttaataaactgagtgtaaaactctatatagatggagtagataatatagaaaattcatatactgatgataataatgaattggtgttaaattttaaagagtacacaatttctattattacagagtcatgcgacgtcggatttgattccatagatatagatgttataaacgactataaaattattgatatgtataccattgactcgtctactattcaacgcagaggtcacacgtgtagaatatctaccaaattatcatgccattatgataagtacccttatattcacaaatatgatggtgatgagcgacaatattctattactgcagagggaaaatgctataaaggaataaaatatgaaataagtatgatcaacgatgatactctattgagaaaacatactcttaaaattggatctacttatatatttgatcgtcatggacatagtaatacatattattcaaaatatgatttttaaaaatttaaaatatattatcacttcagtgacagtagtcaaataacaaacaacaccatgagatatattataattctcgcagttttgttcattaatagtatacatgctaaaataactagttataagtttgaatccgtcaattttgattccaaaattgaatggactggggatggtctatacaatatatcccttaaaaattatggcatcaagacgtggcaaacaatgtatacaaatgtaccagaaggaacatacgacatatccgcatttccaaagaatgatttcgtatctttctgggttaaatttgaacaaggcgattataaagtggaagagtattgtacgggactatgcgtcgaagtaaaaattggaccaccgactgtaacattgactgaatacgacgaccatatcaatttgtacatcgagcatccgtatgctactagaggtagcaaaaagattcctatttacaaacgcggtgacatgtgtgatatctacttgttgtatacggctaacttcacattcggagattctaaagaaccagtaccatatgatatcgatgactacgattgcacgtctacaggttgcagcatagactttgtcacaacagaaaaagtgtgcgtgacagcacagggagccacagaagggtttctcgaaaaaattactccatggagttcgaaagtatgtctgacacctaaaaagagtgtatatacatgcgcaattagatccaaagaagatgttcccaatttcaaggacaaaatggccagagttatcaagagaaaatttaatacacagtctcaatcttatttaactaaatttctcggtagcacatcaaatgatgttaccacttttcttagcatgcttaacttgactaaatattcataactaatttttattaatgatacaaaaacgaaataaaactgcatattatacactggttaacgcccttataggctctaaccattttcaagatgaggtccctgattatagtccttctgttcccctctatcatctactccatgtctattagacgatgtgagaagactgaagaggaaacatggggattgaaaatagggttgtgtataattgccaaagatttctatcccgaaagaactgattgcagtgttcatctcccaactgcaagtgaaggattgataactgaaggcaatggattcagggatatacgaaacaccgataaattataaaaaaagcaatgtgtccgctgtttccgttaataatactattttcgtaactggcggattattcataaataactctaatagcacgatcgtggttaacaatatggaaaaacttgacatttataaagacaaacaatggtcgattatagaaatgcctatggctagggtatatcacggcattgactcgacatttggaatgttatattttgccggaggtctatccgttaccgaacaatatggtaatttagagaaaaacaacgagatatcttgttacaatcctagaacgaataagtggtttgatatttcatatactatttataagatatccatatcatcattgtgtaaactaaataacgtcttctatgtatttagtaaggacattggatatgtggaaaagtatgatggtgcatggaagttagtacatgatcgtctccccgctataaaggcattatcaacttctccttattgattgaaaatgaaaatataaatagtttttatgtatagcagtattaccctatagttttattgcttactactaacatggatacagatgttacaaatgtagaagatatcataaatgaaatagatagagagaaagaagaaatactaaaaaatgtagaaattgaaaataataaaaacattaacaagaatcatcccaatgaatatattagagaagcactcgttattaataccagtagtaatagtgattccattgataaagaagttatagaatgtatcagtcacgatgtaggaatatagatcatatctactaatttttataatcgatacaaaacataaaaaacaactcgttattacatagcaggcatggaatccttcaagtattgttttgataacgatggcaagaaatggattatcggaaatactttatattctggtaattcaatactctataaggtcagaaaaaatttcactagttcgttctacaattacgtaatgaagatagatcacaaatcacacaagccattgttgtctgaaatacgattctatatatctgtattggatcctttgactatcgacaactggacacgggaacgtggtataaagtatttggctattccagatctgtatggaattggagaaaccgatgattatatgttcttcgttataaagaattcgggaagagtattcgccccaaaggatactgaatcagtcttcgaagcatgcgtcactatgataaacacgttagagtttatacactctcgaggatttacccatggaaaaatagaaccgaggaatatactgattagaaataaacgtctttcactaattgactattctagaactaacaaactatacaagagtggaaactcacatatagattacaacgaggacatgataacttcaggaaatatcaattatatgtgtgtagacaatcatcttggagcaacagtttcaagacgaggagatttagaaatgttgggatattgcatgatagaatggttcggtggcaaacttccatggaaaaacgaaagtagtataaaagtaataaaacaaaaaaaagaatataaaaaatttatagctactttctttgaggactgttttcctgaaggaaatgaacctctggaattagttagatatatagaattagtatacacgttagattattctcaaactcctaattatgacagactacgtaaactgtttatacaagattgaaattatattcttttttttatagagtgtggtagtgttacggatatctaatattaatattagactatctctatcgcgctacacgaccaatatcgattactatggatatcttctatgaaaggagagaatgtatttatttctccagcgtcaatctcgtcagtattgacaatactgtattatggagctaatggatccactgctgaacagctatcaaaatatgtagaaacggaggagaacacggataaggttagcgctcagaatatctcattcaaatccatgaataaagtatatgggcgatattctgccgtgtttaaagattcctttttgagaaaaattggcgataagtttcaaactgttgacttcactgattgtcgcactatagatgcaatcaacaagtgtgtagatatctttactgaggggaaaatcaatccactattggatgaaccattgtctcctagcaattagtgccgtatactttaaagcaaaatggttgacgccattcgaaaaggaatttaccagtgattatcccttttacgtatctccgacggaaatggtagacgtaagtatgatgtctatgtacggcaaggcatttaatcacgcatctgtaaaagaatcattcggcaacttttcaatcatagaactgccatatgttggagatactagtatgatggtcattcttccagacaagattgatggattagaatccatagaacaaaatctaacagatacaaattttaagaaatggtgtgactttatggatgctatgtttatagatgttcacattcccaagtttaaggtaacaggctcgtataatctggtggatactctagtaaagtcaggactgacagaggtgttcggttcaactggagattatagcaatatgtgtaatttagatgtgagtgtcgacgctatgatccacaaaacgtatatagatgtcaatgaagagtatacagaagcagctgcagcaacttctgtactagtggcagactgtgcatcaacaattacaaatgagttctgtgcagatcatccgttcatctatgtgattaggcatgttgatggaaaaattcttttcgttggtagatattgctctccgacaactaattgttaaccattttttttaaaaaaaatagaaaaaacatgtggtattagtgcaggtcgttgttcttccaattgcaattggtaagatgacggccaactttagtacccacgtcttttcaccacagcactgtggatgtgacagactgaccagtattgatgacgtcaaacaatgtttgactgaatatatttattggtcgtcctatgcataccgcaacaggcaatgcgctggacaattgtattccacactcctctcttttagagatgatgcggaattagtgttcatcgacattcgcgagctggtaaaaaatatgccgtgggatgatgtcaaagattgtacagaaatcatccgttgttatataccggatgagcaaaaaaccatcagagagatttcggccatcatcggactttgtgcatatgctgctacttactggggaggtgaagaccatcccactagtaacagtctgaacgcattgtttgtgatgcttgagatgctaaattacgtggattataacatcatattccggcgtatgaattgatgagttgtacatcttgacattttctttcttctcttctccctttcttctcttctcccttcctccctcttctccctttcccagaaacaaacttttttacccactataaaataaaatgagtatactacctattatatttcttcctatatttttttattcttcattcgttcagacttttaacgcgtctgaatgtatcgacaaagggcaatattttgcatcattcatggagttagaaaacgagccagtaatcttaccatgtcctcaaataaatacgctatcatccggatataatatattagatattttatgggaaaaacgaggagcggataatgatagaattataccgatagataatggtagcaatatgctaattctgaacccgacacaatcagactctggtatttatatatgcattaccacgaacgaaacctactgtgacatgatgtcgttaaatttgacaatcgtgtctgtctcagaatcaaatatagatcttatctcgtatccacaaatagtaaatgagagatctactggcgaaatggtatgtcccaatattaatgcatttattgctagtaacgtaaacgcagatattatatggagcggacatcgacgccttagaaataagagacttaaacaacggacacctggaattattaccatagaagatgttagaaaaaatgatgctggttattatacatgtgttttagaatatatatacggtggcaaaacatataacgtaaccagaattgtaaaattagaggtacgggatagaataataccttctactatgcaattaccagatggcattgtaacttcaataggtagtaatttgactattgcatgcagagtatcgttgagacctcccacaacggacaccgacgtcttttggataagtaatggtatgtattacgaagaagatgatggggacggaaacggtagaataagtgtagcaaataaaatctatatgaccgataagagacgtgttattacatcccggttaaacattaatcctgtcaaggaagaagatgctacaacgtttacgtgtatggcgtttactattcctagcatcagcaaaacagttactgttagtataacgtgaatgtatgttgttacatttccatgtcaattgagtttataagaatttttatacattatcttccaacaaacaattgacgaacgtattgctatgattaactcccacgatactatgcatattattaatcattaacttgcagactatacctagtgctattttgacatactcgtgttcttgtgtaattgcggtatctatattattaaagtacgtaaatctagctatagttttattatttaattttagataatataccgtctccttatttttaaaaattgccacatcctttattaaatcatgaatgggaatttctatgtcatcgttagtatattgtgaacaacaagagcagatatctataggaaagggtggaatgcgatacattgatctatgtagttttaaaacacacgcgaactttgaagaatttatataaatcattccatcgatacatccttctatgttgacatgtatatatccaggaattcttttattaatgtcaggaaatgtataaactaaaacattgcccgaaagcggtgcctctatctgcgttatatccgttcttaacttacaaaatgtaaccaatacctttgcatgacttgttttgttcggcaacgttagtttaaacttgacgaatggattaattacaatagcatgatccgcgcatctattaagtttttttactttaacgcccttgtatgtttttacagagactttatctaaatttctagtgcttgtatgtgttataaatataacgggatatagaaccgaatcacctaccttagatacccaattacattttatcagatccagataataaacaaattttgtcgccctaactaattctatattgttatatattttacaattggttatgatatcatgtaataacttggagtctaacgcgcatcgtcgtacgtttatacaattgtgatttagtgtagtatatctacacatgtatttttccgcactatagtattctggactagtgataaaactatcgttatatctgtcttcaatgaactcatcgagatattgctctctgtcatattcatacacctgcataaactttctagacatcttacaatccgtgttattttaggatcatatttacatatttacgggtatatcaaagatgttagattagttaatgggaatcgtctataataatgaatattaaacaattatatgaggacttttaccacaaagcatcataaaaatgagtcgtcgtctgatttatgttttaaatatcaaccgcaaatcaactcataaaatacaagagaatgaaatatatacatattttagtcattgcaatatagaccatacttctacagaacttgattttgtagttaaaaactatgatctaaacagacgacaacctgtaactgggtatactgcactacactgctatttgtataataattactttacaaacgatgtactgaagatattattaaatcatgacgtaaatgtaacgatgaaaaccagtagcggacgtatgcctgtttatatattgcttactagatgttgtaatatttcacatgatgtagtgatagatatgatagacaaagataaaaaccacttattacatagagactattccaacctattactagagtatataaaatctcgttacatgttattgaaggaagaggatatcgatgagaacatagtatccactttattagataagggaatcgatcctaactttaaacaagacggatatacagcgttacattattattatttgtgtctcgcacacgtttataaactaggtgagtgtagaaaaccgataacgataaaaaaggccaagcgaattatttctttgtttatacaacatggagctaatctaaacgcgttagataattgtggtaatacaccattccatttgtatcttagtattgaaatgtgtaataatattcatatgactaaaatgctgttgacttttaatccgaatttcaaaatatgtaataatcatggattaacgcctatactatgttatataacttccgactacatacaacacgatattcttgttatgttaatacatcactatgaaacaaatgttggagaaatgccgatagatgagcgtcgtatgatcgtattcgagtttatcaaaacatattctacacgtccggcagattcgataacttatttgatgaataggtttaaaaatataaatatttatacccgctatgaaggaaagacattattacacgtagcatgtgaatataataatacacaagtaatagattatcttatacgtatcaacggagatataaatgcgttaaccgacaataacaaacacgctacacaactcattatagataacaaagaaaattccccatataccattaattgtttactgtatatacttagatatattgtagataagaatgtgataagatcgttggtggatcaacttccatctctacctatcttcgatataaaatcatttgagaaattcatatcctactgtatacttttagatgacacattttacgataggcacgttaagaatcgcgattctaaaacgtatcgatacgcattttcaaaatacatgtcgtttgataaatacgatggtataataactaaatgtcacgacgaaacaatgttactcaaactgtccactgttctagacactacactatatgcagttttaagatgtcataattcgagaaagttaagaagatacctcaacgagttaaaaaaatataataacgataagtcctttaaaatatattctaatattatgaatgagagataccttaatgtatattataaagatatgtacgtgtcaaaggtatatgataaactatttcctgttttcacagataaaaattgtctactaacattactaccttcagaaattatatacgaaatattatacatgctgacaattaacgatctttataatatatcgtatccacctaccaaagtatagttgtatttttctcatgcgatgtgtgtaaaaaaactgatattatataaatattttagtgccgtataataaagatgacgatgaaaatgatggtacatatatatttcgtatcattattgttattgctattccacagttacgccatagacatcgaaaatgaaatcacagaattcttcaataaaatgagagatactctaccagctaaagactctaaatggttgaatccagcatgtatgttcggaggcacaatgaatgatatagccgctctaggagagccattcagcgcaaagtgtcctcctattgaagacagtcttttatcgcacagatataaagactatgtggttaaatgggagaggctagaaaagaatagacggcgacaggtttctaataaacgtgttaaacatggtgatttatggatagccaactatacatctaaattcagtaaccgtaggtatttgtgcaccgtaactacaaagaatggtgactgtgttcagggtatagttagatctcatattaaaaaacctccttcatgcattccaaaaacatatgaactaggtactcatgataagtatggcatagacttatactgtggaattctttacgcaaaacattataataatataacttggtataaagataataaggaaattaatatcgacgacattaagtattcacaaacgggaaaggaattaattattcataatccagagttagaagatagcggaagatacgactgttacgttcattacgacgacgttagaatcaagaatgatatcgtagtatcaagatgtaaaatacttacggttataccgtcacaagaccacaggtttaaactaatactagatccgaaaatcaacgtaacgataggagaacctgccaatataacatgcactgctgtgtcaacgtcattattgatcgacgatgtactgattgaatgggaaaatccatccggatggcttataggattcgattttgatgtatactctgttttaactagtagaggcggtatcaccgaggcgaccttgtactttgaaaatgttactgaagaatatataggtaatacatataaatgtcgtggacacaactattattttgaaaaaacccttacaactacagtagtattggagtaaatatacaatgcatttttatatacattactgaattattattactgaattattattactgaattattattaattatatcgtatttgtgctatagaatggatgaagatacgcgactatctaggtatttgtatctcaccgatagagaacatataaatgtagactctattaaacagttgtgtaaaatatcagatcctaatgcatgttatagatgtggatgtacggctttacatgagtacttttataattatagatcagtcaacggaaaatacaagtatagatacaacggttactatcaatattattcatctagcgattatgaaaattataatgaatattattatgatagaactggtatgaacagtgagagtgataatatatcaatcaaaacagaatatgaattctatgatgaaacacaagatcaaagtacacaactagtaggttacgacattaaactcaaaaccaatgaggatgattttatggctatgatagatcagtgggtgtccatgattatatagatgaatcaattaataaagtagtatatggaagagagtctcacgtaagatggcgggatatatggcaagaacataatgatggcgtatacagtataggaaaggagtgcatagataatatatacgaagacaaccataccgtagacgaattctacaagatagacagcgtatcagatgtagatgacgcggaacacatatctccgataactaaaaaaccatagaatcagttgatgataatacctacatttctaatcttccgtataccatcaaatacaaaatattcgagcaacaataagtattttttatacctttaaaactgataaataaattttttctagtgatattttggcaagatgagaatcctatttctcatcgctttcatgtatgggtgtgttcactcatatgttaacgcggttgaaaccaaatgtccaaatctagacattgtaacatcttctggagaatttcattgttcaggatgtgtggaacatatgcctgagtttagctatatgtattggttggcaaaggatatgaaatcggacgaggataccaagtttatagaacatctgggtgatggcatcaaagaagatgaaaccgttcgtaccacagatagtggaatcgtcactctacgtaaagtccttcatgtgactgatactaataaatttgataattataggttcacttgtgtcctcgctacgctagatggcatttataaaaagaatgtttgctgaagtagttgtgtgctactatttttatttatgatataatctaatggaattaatttgaattgatatttatccaatactaaagattatattagaatcaaattaatcttttatacgagaaaaaataacgacatacgtcgtcaacaaattaaactttttatttattagttaactagcttatagaacttgctcattgttatgtttctaaaacgggtacggcatataggacaattatccgacgcaccggtttctcttcgtgttctatgccatatattgatgcatgttatgcaaaatatatgagtacacgaatccaataaaccaaagtatctatcgttttgagtaaacaacttcatagcaaattccacattctttttctttacttactctatacacgtcctcgtatttatttagtattttgatgatatccaactcagaaatggttgttgtattattgggtgtatttggagtataggtattattagctatgtaccaatttaccaaccctcttaatattgattgataatcacatcggttatccaattaataactaaattgtagtgtatatatagaccatatatgtttctatttttttgacagttacgtatagtttcagtaagttttgattgttgtattcctgtatctctagataagttagtcatatagtcccttccggcgatacgttttttccaagcccgaaattgattagccaaatgtgtatttatttttgtgatattgatataatatttcggataatgcatactgttagtcttatatcatttggttcatctatgtattgtaatattgttacatgatctatagatgatgtattgattttggcaggatcgaattccatatccgcgactaaacagtgaaaaaaatgtaaatactttttaaattttaaattagtaaaacttttttttattttttatgattccaaaaatactgaatacaaagtcctaaattataaatatggagatcatactaccacaacttattattatgtatacaaggccggtgtaatagatagatatatataattctattacaccggcagacaattaccgaccggtatttgtcgttaccaacataccgtataatatgtaatatacaattccataacccattgacagttgttatacatcaaaattgcaattcttttgattacgatgttataagaatgtagttaattgatgtatgatgttaatgtgtcctctttcctcttataacatcgtaatcaaaaacttttttataatatatacctaataatgtgtcttaatagttctcgtgattcgtcaaacaatcattcttataaaatataataaagcaacgtaaaaacacataaaaataagcgtaactaataagacaatggatatttacgacgataaaggtctacagactattaaactgtttaataatgaatttgattgtataaggaatgacatcagagaattatttaaacatgtaactgattccgatagtatacaacttccgatggaagacaattctgatattatagaaaatatcagaaaaatactatatagacgattaaaaaatgtagaatgtgttgacatcgataacacaataacttttatgaaatacgatccaaatgatgataataagcgtacgtgttctaattgggtacccttaactaataactatatggaatattgtctagtaatatatttggaaacaccgatatgtggaggcaaaataaaattataccaccctacaggaaatataaagtcggataaggatattatgtttgcaaagactctagactttaaatcaacgaaagtgttaactggacgtaaaacaattgccgttctagacatatccgtttcatataatagatcaatgactactattcactacaacgacgacgttgatatagatatacatactgataaaaatggaaaagagttatgttattgttatataacaatagatgatcattacttggttgatgtggaaactataggagttatagtcaatagatctggaaaatgtctgttagtaaataaccatctaggtataggtatcgttaaagataaacgtataagcgatagttttggagatgtatgtatggatacaatatttgacttttctgaagcacgagagttattttcattaactaatgatgataacaggaatatagcatgggacactgataaactagacgatgatacagatatatggactcccgtcacagaagatgattacaaatttctttctagactagtattgtatgcaaaatctcaatcggatactgtatttgactattatgttcttactggtgatacggaaccacccactgtattcattttcaaggtaactagattttactttaatatgccgaaataaaaaatttttgtataatatctagaggtagaggtattgtttagataaatacaaataacatagatacatcgcatacttagcatttttataaatatacataagacatacactttatacatttttgtaaaaatactcataaaaaaatttataaaaattatggcacaaccatatcttgtataggtagtttagttcgtcgagtgaacctataaacagataatagacaacacataataatgcctactaatacaagcataataccgggagatgggatatatgacgttgtagtgtttgggttttctgaacgttgatagtctactaatactacatgctgacatctaatgcctgtataaccatgagagcatctacaatacataccgtcaatatctctagcgtggatacagtcaccgtgtaaacaatatccatctccctctggaccgcataatctgatagctggaatatctgttgtagcgtttgtaatttctggcaatgtcgtttcgatagcgttaccactatcggcgaatgatctgattatcatagcagcgaacaacaacatcagataatttatcaacatttttgatggattctgtgtttatgctgtttctcagtgtgtgtttatgacaagattgggaattttatattattaattcagtaatataaactaataatatattgttaattgtgtaaataatataaaaataacaatacaatattgaatgtgttgctgttaaaaatgtatgtgttaatataatagaataaaataaatgagtatgatcattttagataacgattgattttatcattaccgcttcattcttatattctttgcttacggaacctatatttagaaacatctactaacaattttttatgcttgcattattaatggtatgtaatatgattgattgtgtacgcaataccaatttgttaagtatgaatacggggtacaaacataaattgaaatttaacattatttatttatgatatatatcgttatcgttaggtctataccatggatatctttaaagaactaatcttaaaacaccctgatgaaaatgttttgatttctccagtttccattttatctactttatctattctaaatcatggagcagctggttctacagctgaacaactatcaaaatatatagagaatatgaatgagaatacacccgatgacaataatgatgacatggaggtagatattccgtattgtgcgacactagctaccgcaaataaaatatacggtagcgatagtatcgagttccacgcctccttcctacaaaaaataaaagacgattttcaaactgtaaactttaataatgctaaccaaacaaaggaactaatcaacgaatgggttaagacaatgacaaatggtaaaattaattccttattgactagtccgctatccattaatactcgtatgacagttgttagcgccgtccattttaaagcaatgtggaaatatccattttctaaacatcttacatatacagacaagttttatatttctaagaatatagttaccagcgttgatatgatggtgggtaccgagaataacttgcaatatgtacatattaatgaattattcggaggattctctattatcgatattccatacgagggaaactctagtatggtaattatactaccggacgacatagaaggtatatataacatagaaaaaaatataacagatgaaaaatttaaaaaatggtgtggtatgttatctactaaaagtatagacttgtatatgccaaagtttaaagtggaaatgacagaaccgtataatctggtaccgattttagaaaatttaggacttactaatatattcggatattatgcagattttagcaagatgtgtaatgaaactatcactgtagaaaaatttctacatacgacgtttatagatgttaatgaggagtatacagaagcatcggccgttacaggagtatttacgattaacttttcgatggtatatcgtacgaaggtctacataaaccatccattcatgtacatgattaaagacaccacaggacgtatactttttatagggaaatactgctatccgcaataaatataaacaaatagacttttataaagagtcttcaacgataagtatatcgacatactacttatgctgcgaaagattctgaacgagaacgactatctcaccctcttggatcatatccgcactgctaaatactaaatctccactacactttttatcatcttatgaggaatgattgccttcgtgaaataggaataattagcaccagaatagctatggattattgtggtagagagtgcactattctatgtcgtctactggatgaagatgtgacgtacaaaaaaataaaactagaaattgaaacgtgtcacaacttatcaaaacatatagatagacgaggaaacaatgcgctacattgttacgtctccaataaatgcgatacagacattaagattgttctctcgcggagtcgagagactttgtagaaacaacgaaggattaactccgctaggagtatacagtaagcatagatacgtaaaatctcagattgtgcatctactgatatccagctattcaaattcctctaacgaactcaagtcgaatataaatgatttcgatctgtattcggataatatcgacttacgtctgctaaaatacctaattgtggataaacggatacgtccgtccaagaatacgaattatgcaatcaatggtctcggattggtggatatatacgtaacgacgcctaatccgagaccagaagtattgctatggcttcttaaatcagaatgttacagcaccggttacgtatttcgtacctgtatgtacgacagtgatatgtgtaagaactctcttcattactatatatcgtctcatagagaatctcaatctctatccaaggatgtaattaaatgtttgatcgataacaatgtttccatccatggcagagacgaaggaggatctttacccatccaatactactggtctttctcaaccatagatatagagattgttaaattattattaataaaggatgtggacacgtgtagagtatacgacgtcagccctatattagaggcgtattatctaaacaagcgatttagagtaaccccatataatgtagacatggaaatcgttaatcttcttattgagagacgtcatactcttgtcgacgtaatgcgtagtattacttcgtacgattccagagaatataaccactacatcatcgataacattctaaagagatttagacaacaggatgaatccatcgtacaagccatactgataaactacttacattacggcgatatggtcgttcgatgcatgttagataacggacaacaactatcctctacacgactactttgttaataataatctcgtcgatgtaaacgtcgtaaggtttatcgtggaaaatatggacacgcggctgtaaatcacgtatcgaacaatggccgtctatgtatgtacggtctgatattatcgagatttaataattgcgggtatcactgttatgaaaccatactgatagatgtatttgatatactaagcaagtacatggatgatatagatatgatcgataactctactatattacgcggtcgatgtcaataatatacaatttgcaaagcggttattggaatatggagcgagtatcacgctcgataatcaatacggccatccagaaaagcagttacagaagagaaaacaaaacgaaatcgttgttctacaagatgtctctccctacgacgattactacgtaaaaaagatactagcctactgcctattaagggacgagtcattcgcggaactacatagtaaattctgtttaaacgaggactataaaagtgtatttatgaaaaatatatcattcgataagatagattccatcatcgtgacataagtcgcctcaaagagattcgaatctccgacaccgacctgtatacggtatcacagctatcttaaagccatacattcagacagtcacatttcatttcccatgtacgacgatctcatagaacagtgccatctatcgatggagcgtaaaagtaaactcgtcgacaaagcactcaataaattagagtctaccatcggtcaatctagactatcgtatttgcctccggaaattatgcgcaatatcatctaaacagtatgttgtacggaaagaaccattacaaatattatccatgatagaaagaaaatatctatatgattggagaagtaggaaacaggaacaagacaacgattactacattattaaatcatgaagtccgtattatactcgtatatattgtttctctcatgtataataataaacggaagagatatagcaccgcatgcaccatccgatggaaagtgtaaagacaacgaatacaaacgccataatttgtgtccgggaacatacgcttccagattatgcgatagcaagactaacacacgatgtacgccgtgtggttcgggtaccttcacatctcgcaataatcatttacccgcttgtctaagttgtaacggaagacgcgatcgtgtaacacgactcacaatagaatctgtgaatgctctcccggatattattgtcttctcaaaggatcatccggatgcaaggcatgtgtttcccaaacaaaatgtggaataggatacggagtatccggagacgtcatctgttctccgtgtggtctcggaacatattctcacaccgtctcttccgcagataaatgcgaacccgtacccagaaatacgtttaactatatcgatgtggaaattaacctgtatccagttaacgacacgtcgtgtactcggacgaccactaccggtctcagcgaatccatctcaacgtcggaactaactattactatgaatcataaagactgtaatcccgtatttcgtgatggatacttctccgttcttaataaggtagcgacttcaggtttctttacaggagaaaggtgtgcactctgaatttcgagattaaatgcaataacaaagattcttcctccaaacagttaacgaaagcaaagaatgatactatcatgccgcattcggagacagtaactctagtgggcgacatctatatactatatagtaataccaatactcaagactacgaaactgatacaatctcttatcatgtgggtaatgttctcgatgtcgatagccatatgcccggtagttgcgatatacataaactgatcactaattccaaacccacccactttttatagtaagtttttcacccataaataataaatacaataattaatttctcgtaaaagtagaaaatatattctaatttattgcacggtaaggaagtagaatcataaagaacagtactcaatcaatagcaattatgaaacaatatatcgtcctggcatgcatgtgcctggcggcagctgctatgcctgccagtcttcagcaatcatcctcatcctcctcctcgtgtacggaagaagaaaacaaacatcatatgggaatcgatgttattatcaaagtcacaaagcaagaccaaacaccgaccaatgataagatttgccaatccgtaacggaaattacagagtccgagtcagatccagatcccgaggtggaatcagaagatgattccacatcagtcgaggatgtagatcctcctaccacttattactccatcatcggtggaggtctgagaatgaactttggattcaccaaatgtcctcagattaaatccatctcagaatccgctgatggaaacacagtgaatgctagattgtccagcgtgtccccaggacaaggtaaggactctcccgcgatcactcatgaagaagctcttgctatgatcaaagactgtgaagtgtctatcgacatcagatgtagcgaagaagagaaagacagcgacatcaagacccatccagtactcgggtctaacatctctcataagaaagtgagttacgaagatatcatcggttcaacgatcgtcgatacaaaatgcgtcaagaatctagagtttagcgttcgtatcggagacatgtgcaaggaatcatctgaacttgaggtcaaggatggattcaagtatgtcgacggatcggcatctgaaggtgcaaccgatgatacttcactcatcgattcaacaaaactcaaagcgtgtgtctgaatcgataactctattcatctgaaattggatgagtagggttaatcgaacgattcaggcacaccacgaattaaaaaagtgtaccggacactatattccggtttgcaaaacaaaaatgttcttaactacattcacaaaaagttacctctcgcgacttcttctttttctgtctcaatagtgtgatacgattatgacactattcctattcctattcctatttcctttcagagtatcacaaaaatattaaacctctttctgatggtctcataaaaaaagttttacaaaaatatttttattctctttctctctttgatggtctcataaaaaaagttttacaaaaatatttttattctctttctctctttgatggtctcataaaaaaagttttacaaaaatatttttattctctttctctctttgatggtctcataaaaaaagttttacaaaaatatttttattctctttctctctttgatggtctcataaaaaaagttttacaaaaatatttttattctctttctctctttgatggtctcataaaaaaagttttacaaaaatatttttattctctttctctctttgatggtctcataaaaaaagttttacaaaaatatttttattctctttctctctttgatggtctcataaaaaaagttttacaaaaatatttttattctctttctctctttgatggtctcataaaaaaagttttacaaaaatatttttattctctttctctctttgatggtctcataaaaaaagttttacaaaaatatttttattctctttctctctttgatggtctcataaaaaaagttttacaaaaatatttttattctctttctctctttgatggtctcataaaaaaagttttacaaaaatatttttattctctttctctctttgatggtctcataaaaaagttttacaaaaatatttttattctctttctctctttgatggtctcataaaaaagttttacaaaaatatttttattctctttctctctttgatggtctcataaaaaaagttttacaaaaatatttttattctctttctctctttgatggtctcataa

SEQ ID NO: 21 - DNA, 194711 bp, Vaccinia virus
  Vaccinia virus Western Reserve
atttaaaatataatattaatgtactaaaacttatatattattaatttatctaactaaagttagtaaattatatatataattttataattaatttaattttactaattttatttagtgtctagaaaaaaatgtgtgacccatgactgtaggaaactctagagtgtaagaaagatcgatcgctttatagagaccatcagaaagaggtttaatatttttgtgagaccatcgaagagagaaagagataaaacttttttacgactccatcagaaagaggtttaatatttttgtgagaccatcgaagagagaaagagataaaacttttttacgactccatcagaaagaggtttaatatttttgtgagaccatcgaaggagaaagagataaaacttttttacgactccatcagaaagaggtttaatatttttgtgagaccatcgaaggagaaagagataaaacttttttacgactccatcagaaagaggtttaatatttttgtgagaccatcgaagagagaaagagataaaacttttttacgactccatcagaaagaggtttaatatttttgtgagaccatcgaagagagaaagagataaaacttttttacgactccatcagaaagaggtttaatatttttgtgagaccatcgaaggagaaagagataaaacttttttacgactccatcagaaagaggtttaatatttttgtgagaccatcgaagagagaaagagataaaacttttttacgactccatcagaaagaggtttaatatttttgtgagaccatcgaagagagaaagagataaaacttttttacgactccatcagaaagaggtttaatatttttgtgagaccatcgaagagagaaagagataaaacttttttacgactccatcagaaagaggtttaatatttttgtgagaccatcgaagagagaaagagataaaacttttttacgactccatcagaaagaggtttaatatttttgtgagaccatcgaagagagaaagagataaaacttttttacgactccatcagaaagaggtttaatatttttgtgagaccatcgaagagagaaagagaaagagatagttgatctagatatttttcttagtacaaaagtcaatgttttaaaatatatggacaagaatttgtctgtataaaaacttgtgtgaaattttgtaccaaagaaaaaatgtgagcagtatcccctacatggattttactagatcatttatataccaaaaaatattatacgatctacgttttattatatgattttaacgtgtaaattataaacattattttatgatatacaattgtctggtaacctagatgggcataggggatgttgataagctcgacgagtatatgttgttggacgttattgtttaagaaatagttgatgcatcagaaagagaataaaaaatattttagtgagaccatcgaagagagaaagagataaaacttttttacgactccatcagaaagaggtttaatatttttgtgagaccatcgaagagagaaagagataaaacttttttacgactccatcagaaagaggtttaatatttttgtgagaccatcgaagagagaaagagataaaacttttttacgactccatcagaaagaggtttaatatttttgtgagaccatcgaagagagaaagagataaaacttttttacgactccatcagaaagaggtttaatatttttgtgagaccatcgaagagagaaagagataaaacttttttacgactccatcagaaagaggtttaatatttttgtgagaccatcgaagagagaaagagataaaacttttttacgactccatcagaaagaggtttaatatttttgtgagaccatcgaagagagaaagagataaaacttttttacgactccatcagaaagaggtttaatatttttgtgagaccatcgaagagagaaagagataaaacttttttacgactccatcagaaagaggtttaatatttttgtgagaccatcgaagagagaaagagataaaacttttttacgactccatcagaaagaggtttaatatttttgtgagaccatcgaagagagaaagagataaaacttttttacgactccatcagaaagaggtttaatatttttgtgagaccatcgaagagagaaagagataaaacttttttacgactccatcagaaagaggtttaatatttttgtgagaccatcgaagagagaaagagataaaacttttttacgactccatcagaaagaggtttaatatttttgtgagaccatcgaagagagaaagagataaaacttttttacgactccatcagaaagaggtttaatatttttgtgagaccatcgaagagagaaagagataaaacttttttacgactccatcagaaagaggtttaatatttttgtgagaccatcgaagagagaaagagataaaacttttttacgactccatcagaaagaggtttaatatttttgtgagaccatcgaagagagaaagagataaaacttttttacgactccatcagaaagaggtttaatatttttgtgagaccatcgaagagagaaagagataaaacttttttacgactccatcagaaagaggtttaatatttttgtgagaccatcgaagagagaaagagataaaacttttttacgactccatcagaaagaggtttaatatttttgtgagaccatcgaagagagaaagagaataaaaatattttatgactccattgaagagagaaagagaaaatgagaatgagaataaaaatattttagtgacaccatcagaaagaggtttaatatttttgtgagaccatcgaagagagaaagagaataaaaatattttatgactccattgaagagagaaagagaaaatgagaatgagaataaaaatattttagtgacaccatcagaaagaggtttaatattttttatgagaccatcaaagagagaaagagaataaaaatatttttgtaaaactttttttatgagaccatcaaagagagaaagagaataaaaatatttttgtaaaactttttttatgagaccatcaaagagagaaagagaataaaaatatttttgtaaaactttttttatgagaccatcaaagagagaaagagaataaaaatatttttgtaaaactttttttatgagaccatcaaagagagaaagagaataaaaatatttttgtaaaactttttttatgagaccatcaaagagagaaagagaataaaaatatttttgtaaaactttttttatgagaccatcaaagagagaaagagaataaaaatatttttgtaaaactttttttatgagaccatcaaagagagaaagagaataaaaatatttttgtaaaactttttttatgagaccatcagaaagaggtttaatatttttgtgataccctgaaaggaaataggaataggaataggaatagtgtcataatcgtatcacactattgagacagaaaaagaagaagtcgcgagaggtaactttttgtgaatgtagttaagaacatttttgttttgcaaaccggaatatagtgtccggtacacttttttaattcgtggtgtgcctgaatcgttcgattaaccctactcatccaatttcagatgaatagagttatcgattcagacacacgctttgagttttgttgaatcgatgagtgaagtatcatcggttgcaccttcagatgccgatccgtcgacatacttaaatccatccttgacctcaagttcagatgattccttgcacatgtctccgatacgaacgctaaactctagattcttgacacattttgtatcgacgatcgttgaaccgatgatatcttcgtaactcactttcttatgagagatgttagacccgagtactggatgggtcttgatgtcgctgtctttctcttcttcgctacatctgatgtcgatagacacctcacagtctttgatcatagccagagcttcttcatgagtgatcgcgggagagtccttaccttgtcctggggacacgctggacaatctagcattcactgtgtttccatcagcggattctgagatggatttaatctgaggacatttggtgaatccaaagttcattctcagacctccaccgatgatggagtaataagtggtaggaggatctacatcctcgactgatgtggaatcatcttctgattccacctcgggatctggatctgactcggactctgtaatttccgttacggattggcaaatcttatcattggtcggtgtttggtcttgctttgtgactttgataataacatcgattcccatatgatgtttgttttcttcttccgtacacgaggaggaggatgaggatgattgctgaagactggcaggcacatgcatgccaggacgatatattgtttcatgattgctattgattgagtactgttctttatgattctacttccttaccgtgcaataaattagaatatattttctacttttacgagaaattaattattgtatttattatttatgggtgaaaaacttactataaaaagcgggtgggtttggaattagtgatcagtttatgtatatcgcaactaccgggcatatggctatcgacatcgagaacattacccacatgataagagattgtatcagtttcgtagtcttgagtattggtattactatatagtatatagatgtcgacgctagatagacagtctccgaatgcggcatgataccgtcatcattctttgctttcgttaactgtttggaggaaaaatttttgttattgcatttaatctcgaaattcagagtgcacacctttctcctgtaaagaaacctgaagttgctaccttattaaggacggagaagtattcctcacgaaatacgggattacagtctttatgattcatagtaatagttagttccgacgttgagatggattcgctgagaccggtagtggtcgttaactggatacagattaatttccacatcgatatagttaaaggtattactgggtacgggttcgcatttatctgcggaagagacggtgtgagaatatgttccgagaccacacggagaacagatgacgtctccggatactccgtatcctattccacattttgtttgggaaacacatgccttgcatccggatgatcctttgagaagacaataatatccgggagagcattcacagattctattgtgagtcgtgttacacggtcgcgtcttccgttacaacttagacaagcgggtaaatgattattgcgagatgtgaaggtacccgaaccacacggcgtacattgtgtgttagtcttgctatcgcataatctggaagcgtatgttcccggacacaaattatggcgtttgtattcgttgtctttacactttccatcggatggtgcatgcggtgctatatctcttccgtttattattatacatgagagaaacaatatatacgagtataatacggacttcatgatttaataatgtagtaatcgtcgtcttgttcctgtttcctacttctccaatcatatagatattttctttctatcatggataatatttgtaatggttcttttcgtacaacatactgtttagatgatattgcgcataatttccggaggcaaatacgatagtctagattgaccgatggtagactctaatttattgagtgctttgtcgacgagtttacttttacgctccatcgatagatggcactgttctatgagatcgtcgtacatgggaaatgaaatgtgactgtctgaatgtatggctttaagatagctgtgataccgtatacaggtcggtgtcggagattcgaatctctttaaggcgacttatgtcacgatgatggaatctatcttatcgaatgatatatttttcataaatacacttttatagtcctcgtttaaacagaatttactatgtagttccgcgaatgactcgtcccttaataggcagtaggctattatcttctttacgtagtaatcgtcgtagggagagacatcttgtagaacaacgatttaatcataggtagagatactttcagtctgtggtggatgatgtcattcacaacatccgccttgtatatgatgtttctgttttcaaacaccaagtcgaataccgtctttagtcggaaggttgatgtcgtatccgatgtatgaggcaacattgttgttacaattttgaaaggcggtattatagtattcgtctttctgaatgtcgaacctatctagtagataccgtagtatattgagagtgtatccttgattatgttttatgaatagataaagtagatgttgtccttcttccttttgttcgtgccaattgagtaacattatgagaatatgacctgttgcacaatcgttccatgatgggtgtacaatcaagattattacgtatcctcgtatcggctcctcgagataaaagagcatacaccacacgaggactatgtttggtatactgttgaaggtaagtgtgtaaccgcgttaatgtttgctccataatctattatcgcgtagatgaatcgcttctcggctcgcatcttagtgtgacttaacttgtaataattgcttttgtagaacgtggatatgtgtttacagtagtaatgaagagaagtgagttcatcctcgtcggatcctttgtacagaacgtaatagtttaagctcccattgaatttatatctaagataacacagcaatagatcggatgatttactaaagtcatcaatggtgtccgttagtatatcaaagatcttgttatcgattgatagtggtgtcctttttcatccttgctatcaaagttacgcatgccgtggtgtaacaatatctttaatacagatggattaaatcgtgtattcatcgtatagcaatgtaatggagagttacctcgtttattcagatcgcagtgtttaataactagcttaaacagatgagacgatgtatccacatcaaagaacgtgaaatacatatgacagacattgttgacagaaacgtgaccttcattcttaccgtcgtccataaatacgttaggtatgtaccacatactgtcgcgaacgatgcgtacaatctcgtccatctcataatgatttactttttcataattaaagatgtgaaagaaaaacagaacaatatatttttttagtaatgtttatgcgagacatataaaataaactccgtgtttatgatcatttttaacagcaacacattcaatattgtattgttatttttatattatttacacaattaacaatatattattagtttatattactgaattaataatataaaattcccaatcttgtcataaacacacactgagaaacagcataaacacaaaatccatcaaaaatgtcgatgaaatatctgatgttgttgttcgctgctatgataatcagatcattcgccgatagtggtaacgctatcgaaacgacatcgccagaaattacaaacgctacaacagatattccagctatcagattatgcggtccagagggagatggatattgtttacacggtgactgtatccacgctagagatattgacggtatgtattgtagatgctctcatggttatacaggcattagatgtcagcatgtagtattagtagactatcaacgttcagaaaacccaaacactacaacgtcatatatcccatctcccggtattatgcttgtattagtaggcattattattattacgtgttgtctattatctgtttataggttcactcgacgaactaaactacctatacaagatatggttgtgccataatttttataaatttttttatgagtatttttacaaaaaaaatgtataaagtgtatgtcttatgtatatttataaaaatgctaagtatgcgatgtatctatgttatttgtatttatctaaacaatacctctacctctagatattatacaaaaattttttatttcggcatattaaagtaaaatctagttaccttgaaaatgaatacagtgggtggttccgtatcaccagtaagaacataatagtcgaatacagtatccgattgagattttgcatacaatactagtctagaaagaaatttgtaatcatcttctgtgacgggagtccatatatctgtatcatcgtctagtttatcagtgtcccatgctatattcctgttatcatcattagttaatgaaaataactctcgtgcttcagaaaagtcaaatattgtatccatacatacatctccaaaactatcgcttatacgtttatctttaacgatacctatacctagatggttatttactaacagacattttccagatctattgactataactcctatagtttccacatcaaccaagtaatgatcatctattgttatataacaataacataactcttttccatttttatcagtatgtatatctatatcaacgtcgtcgttgtagtgaatagtagtcattgatctattatatgaaacggatatgtctagaacggcaattgttttacgtccagttaacactttctttgatttaaagtctagagtctttgcaaacataatatccttatccgactttatatttcctgtagggtggtataattttattttgcctccacatatcggtgtttccaaatatattactagacaatattccatatagttattagttaagggtacccaattagaacacgtacgcttattatcatcatttggatcgtatttcataaaagttattgtactatcgatgtcaacacattctacattttttaatcgtctatatagtatttttctgatattttctataatatcagaattgtcttccatcggaagttgtatactatcggaatcagttacatgtttaaataattctctgatgtcattccttatacaatcaaattcattattaaacagtttaatagtctgtagacctttatcgtcgtaaatatccattgtcttattagttacgcttatttttatgtgttttacgttgctttattatattttataagaatgattgtttgacgaatcacgagaactattaagacacattattaggtatatattataaaaaagtttttgattacgatgttataagaggaaagaggacacattaacatcatacatcaattaactacattcttataacatcgtaatcaaaagaattgcaattttgatgtataacaactgtcaatgggttatggaattgtatattacatattatacggtatgttggtaacgacaaataccgatcggtaattgtctgccggtgtaatagaattatatatatctatctattacaccggctgagtatgcataataataagttgtggtagtatgatctccatatttataatttaggactttgtattcagtatttttggaatcataaaaaataaaaaaaagttttactaatttaaaatttaaaaagtatttacatttttttcactgtttagtcgcggatatggaattcgatcctgccaaaatcaatacatcatctatagatcatgtaacaatattacaatacatagatgaaccaaatgatataagactaacagtatgcattatccgaaatattaataacattacatattatatcaatatcacaaaaataaatacacatttggctaatcaatttcgggcttggaaaaaacgtatcgccggaagggactatatgactaacttatctagagatacaggaatacaacaatcaaaacttactgaaactatacgtaactgtcaaaaaaatagaaacatatatggtctatatatacactacaatttagttattaatgtggttattgattggataaccgatgtgattgttcaatcaatattaagagggttggtaaattggtacatagctaataatacctatacacccaataatacaacaaccatttctgagttggatatcatcaaaatactggataaatacgaggacgtgtatagagtaagtaaagaaaaagaatgtggaatttgctatgaagttgtttactcaaaacgatagatactttggtttattggattcgtgtactcatatattttgcataacatgcatcaatatatggcataaaacacgaagagaaaccggtgcgtcggataattgtcctatatgtcgtacccgttttagaaacataacaatgagcaagttctataagctagttaactaataaataaaaagtttaatttgttgacgacgtatgtcgttatttttctcgtatgaaagattaaattcaattcaattcgttgtttctaatataatctgccgtattggatggattctcaagacaattgcatttagattatattatcatgaataaaaatagtagcacgcactacttcagccaaatattcttttttgaaacgccatctatcgtagtgaggacacaagtgaacctataattatcaaatttattagtatcagtcacatgaaggactttctgtagagtgacgattctaccatctatggtactaacggtttcatcctccttgataccctcacccaaatgttctataaatttagcatcctcgtccgatctcatatcctttgccaaccaatacatgtagctaaaattaggcataaatttcacacatccagtgcaacgaaattctccagaagatgttacgatgtttaggttaggacatttgatttcgtcggcattaacatatgggtgaacacacccatacatgaaagcgatgagaaataggattctcatcttgccaaaatatcactagaaaaaatttatttatcaattttaaaggtataaaaaatacttattgttgctcgaatattttgtatttgatggtatacggaagattagaaatgtaggtattatcatcaactgattctatggttttatgtattctatcatgtttcactattgcgtcggaaataatatcatatgcttccacatatattttattttgttttaactcataatactcacgtaattctggattattggcatatctatgaataattttagctccatgatcagtaaatattaatgagaacatagtattaccacctaccattatttttttcatttcgttcaattcttgattgcaaagatctatataatcattatagcgttgacttatggactctggaatcttagacgatgtacagtcatctataatcatggcatatttaatacattgttttatagcatagtagttatctacgatgttagatatttctctcaatgaatcaatcacacaatctaatgtaggtttatgacataatagcattttcagcagttcaatgtttctagattcgttgatggcaatggctatacatgtatatccgttatttgatctaatgttgacatctgaaccggattctagcagtaaagatactagagattgtttattatatctaacagccttgtgaagaagtgtttctcctcgtttgtcaatcatgttaatgtctttaagataaggtaggcaaatgtttatagtactaagaattgggcaagcataagacatgtcacaaagaccctttttgtatgtataagtgtaaaaattataacattcatagttggatttacataggtgtccaatcgggatctctccatcatcgagataattgatggcatctcccttccttttttagtagatatttcatcgtgtaagaatcaatattaatatttctaaagtattcgtgtatagcctctttatttaccacagttccatattccactagagggatatcgccgaatgtcatatactcaattagtatatgttggaggacatccgagttcattgttttcaatatcaaaaagatggtttccttatcatttctccatagtggtacaatactacacattattccgtgcggctttccattttccaaaaacaatttgaccaaatctaaatctacatctttattgtatctataatcactatttagataatcagccataattactcgagtgcaacatgttagatcgtctatatatgaataagcagtgttatctattcctttcattaacaatttaacgatgtctatatctatatgagatgacttaatataatattgaagagctgtacaatagtttttatctatagaagacggcttgattccgtgattaattagacatttaacaacttccggacgcacatatgctctcgtatccgactttgaatacagatgagagatgatatacagatgcaatacggtaccgcaatttcgtagttgataatcatcatacgcgtatcagtactcgtcctcataaagaacactgcagccattttctatgaacaaatcaataattttaggaacaggatcattgtcattacataattttctataactgaacgatggttttcacatttaacactcaagtcaaatccatgttctaccaacacctttatcaagtcaacgtctacatttttggatttcatatagctgaatatattaaagtcatttatgttgctaaatccagtggcttctagtagagccatcgctatatcctttaactttaacatgtctactatttgtgtattcttctaatggggtagctgtctccaatttttgcgtaatggattagtgccactgtctagtagtagtttgacgacctcgacattattacaatgctcattaaaaaggtatgcgtgtaaagcattattcttgaattggttcctggtatcattaggatctctgtctctcaacatctgtttaagttcatcgagagccacctcctcattttccagatagtcaaacattttgactgaatgagctactgtgaactctatacacccacacaactaatgtcattaaatattatttttttgaatgtatttataccatgtcaaaaacttgtacaattattaataaaaataatttagtgtttaaattttaccagttccagattttacacctccgttaaccccactttttacaccactggacgatcctcctccccacattccaccgccaccagatgtataagttttagatcctttattactaccatcatgtccatggataaagacactccacatgccgccactactaccccctttagaagacatattaataagacttaaggacaagtttaacaataaaattaatcacgagtaccctactaccaacctacactattatatgattatagtttctatttttacagtaccttaactaaagtctctagtcacaagagcaatactaccaacctacactattatatgattatagtttctatttttataggaacgcgtacgagaaaatcaaatgtctaatttctaacggtagtgttgataaacgattatcgtcaatggatacctcctctatcatgtcgtctattttcttactttgttctattaacttattagcattatatattatttgattataaaacttatattgcttattagcccaatctgtaaatatcggattattaacatatcgtttctttgtaggtttatttaacatgtacatcactgtaagcatgtccgtaccatttattttaatttgacgcatatccgcaatttctttttcgcagtcggttataaattctatatatgatggatacatgctacatgtgtacttataatcgactaatatgaagtacttgatacatattttcagtaacgatttattattaccacctatgaataagtacctgtgatcgtctaggtaatcaactgttttcttaatacattcgatggttggtaatttactcagaataatttccaatatcttaatatataattctgctatttctgggatatatttatctgccagtataacacaaatagtaatacatgtaaacccatattttgttattatattaatgtctgcgccattatctattaaccattctactaggctgacactatgcgacttaatacaatgataaagtatactacatccatgtttatctattttgtttatatcatcaatatacggcttacaaagttttagtatcgataacacatccaactcacgcatagagaaggtagggaataatggcataatatttattaggttatcatcattgtcattatctacaactaagtttccattttttaaaatatactcgacaactttaggatctctattgccaaatttttgaaaatatttatttatatgcttaaatctatataatgtagctccttcatcaatcatacatttaataacattgatgtatactgtatgataagatacatattctaacaatagatcttgtatagaatctgtatatcttttaagaattgtggatattaggatattattacgtaaactattacacaattctaaaatataaaacgtatcacggtcgaataatagttgatcaactatataattatcgattttgtgatttttcttcctaaactgtttacgtaaatagttagatagaatattcattagttcatgaccactatagttactatcgaataacgcgtcaaatatttcccgtttaatatcgcatttgtcaagataataatagagtgtggtatgttcacgataagtataataacgcatctcttttttgtgtgaaattaaatagtttatcacgtccaaagatgtagcataaccatcttgtgacctagtaataatataataatagagaactgttttacccattctatcatcataatcagtggtgtagtcgtaatcgtaatcgtctaattcatcatcccaattataatattcaccagcacgtctaatctgttctattttgatcttgtatccatactgtatgttgctacatgtaggtattcctttatccaataatagtttaaacacatctacattgggatttgatgttgtagcgtatttctctacaatattaataccatttttgatactatttatttctatacctttcgaaattagtaatttcaataagtctatatcgatgttatcagaacatagatattcgaatatatcaaaatcattgatatttttatagtcgactgacgacaataacaaaatcacaacatcgtttttgatattattatttttcttggtaacgtatgcctttaatggagtttcaccatcatactcatataatggatttgcaccactttctatcaatgattgtgcactgctggcatcgatgttaaatgttttacaactatcatagagtatcttatcgttaaccatgattggttgttgatgctatcgcattttttggtttctttcatttcagttatgtatggatttagcacgtttgggaagcatgagctcatatgatttcagtactgtagtgtcagtactattagtttcgatcagatcaatgtctagatctatagaatcaaaacacgataggtcagaagataatgaatatctgtacgcttctttttgtactgtaacttctggttttgttagatggttgcatcgtgctttaacatcaatggtacaaattttatcctcgctttgtgtatcatattcgtctctagtataaaattctatattcagattatcatgcgatgtgtatacgctaacggtatcaataaacggagcacaccatttagtcataacagtaatccaaaattttttaaagtatatcttaacgaaagaagttgtgtcattgtctacggtgtatggtactagatcctcataagtgtatatatctagagtaatgtttaatttattaaatggttgataatatggatcctcatgacaatttccgaagatggaaatgagatatagacatgcaataaatctaatcgaagacatggttactccttaaaaaaatacgaataatcaccttggctatttagtaagtgtcatttaacactatactcatattaatccatggactcataatctctatacgggattaacggatgttctatatacggggatgagtagttttcttctttaactttatactttttactaatcatatttagactgatgtatgggtaatagtgtttaaagagttcgttctcatcatcagaataaatcaatatctctgtttttttgttatacagatgtattacagcctcatatattacgtaatagaacgtgtcatctaccttattaactttcaccgcatagttgtttgcaaatacggttaatcctttgacctcgtcgatttccgaccaatctgggcgtataatgaatctaaactttaatttcttgtaatcattcgaaataatttttagtttgcatccgtagttatcccctttatgtaactgtaaatttctcaacgcgatatctccattaataatgatgtcgaattcgtgctgtatacccatactgaatggatgaactaacgaatatcaacggcgttaatagtaatttactttttcatctttacatattgggtactagttttactatcataagtttataaattccacaagctactatggaataagccaaccatcttagtataccacacatgtcttaaagtttattaattaattacatgttgttttatatatatcgctacgaatttaaagagaaatcagtttaggaagaaaaaaattatctatctacatcatcacgtctctgtattctacgatagagtgctactttaagatgagacatatccgtgtcatcaaaaatatactccattaaaatgattattccggcagcgaacttgatattggatatatcacaacctttgttaatatctacgacaatagacagcagtcccatggttccataaacagtgagtttatctttctttgaagcgatagtttgtagagatcttataaaaccgtcaaacgacatcgcatttatatctttagctaattcatatatgttaccatcgtaatatctaaccgcgtctatcttaaacgtttccatcgctttaaagacgtttccgatagatggtctcatttcatcagtcatactgagccaacaaatataatcgtgtataacatctttgatagaatcagactctaaagaaaacgaatcggctttattatacgcattcatgataaacttaatgaaaaatgtttttcgttgtttaagttggatgaatagtatgtcttaataattgttattatttcattaattaatatttagtaacgagtacactctataaaaacgagaatgacataactagttatcaaagtgtctaggacgcgtaattttcatatggtatagatcctgtaagcattgtctgtattctggagctattttctttatcgcattagtaagttcagaatatgttataaatttaaatcgaataacgaacatgactttagtaaagtcgtctatattaactcttttattttctagccatcgtaataccatgtttaagatagtatattctctagttactacgatctcatcgttgtctagaatatcacatactgaatctacatccaattttagaaattggtctgtgttacatatctcttctatattattgttgatgtattgtcgtagaaaactattacgtagaccattttctttataaaacgaatatatagtactccaattatctttaccgatatatttgcacacataatccattctctcaatcactacatctttaagattttcgttgttaagatatttggctaaactatataattctattagatcatcaacagaatcagtatatatttttctagatccaaagacgaactctttggcgtcctctataatattcccagaaaagatattttcgtgttttagtttatcgagatctgatctgttcatatacgccatgattgtacggtacgttatgataaccgcataaaataaaaatccattttcatttttaaccaatactattcataattgagattgatgtaatactttgttactttgaacgtaaagacagtacacggatccgtatctccaacaagcacgtagtaatcaaatttggtgttgttaaacttcgcaatattcatcaatttagatagaaacttatactcatcatctgttttaggaatccatgtattattaccactttccaacttatcattatcccaggctatgtttcgtccatcatcgttgcgcagagtgaataattcttttgtattcggtagttcaaatatatgatccatgcatagatcggcaaagctattgtagatgtgatttttcctaaatctaatataaaactcgtttactagcaaacactttcctgatttatcgaccaagacacatatggtttctaaatctatcaagtggtggggatccatagttatgacgcagtaacatagattattacattcttgactgtcgctaatatctaaatatttattgttatcgtattggattctgcatatagatggcttgtatgtcaaagatatagaacacataaccaatttatagtcgcgctttacattctcgaatctaaagttaagagatttagaaaacattatatcctcggatgatgttatcactgtttctggagtaggatatattaaagtctttacagatttcgtccgattcaaataaatcactaaataatatcccacattatcatctgttagagtagtatcattaaatctattatattttatgaaagatatatcactgctcacctctatatttcgtacatttttaaactgtttgtataatatctctctgatacaatcagatatatctattgtgtcggtagacgataccgttacatttgaattaatggtgttccattttacaacttttaacaagttgaccaattcatttctaatagtatcaaactctccatgattaaatattttaatagtatccattttatatcactacggacacaaagtagctgacataaaccattgtataatttttatgttttatgtttattagcgtacacattttggaagttccggcttccatgtatttcctggagagcaagtagatgatgaggaaccagatagtttatatccgtacttgcacttaaagtctacattgtcgttgtatgagtatgatcttttaaacccgctagacaagtatccgtttgatattgtaggatgtggacatttaacaatctgacacgtgggtggatcggaccattctcctcctgaacacaggacaccagagttaccaatcaacgaatatccactattgcaactataagttacaacgctcccatcggtataaaaatcctcgtatccgttatgtcttccgttggatatagatggaggggattggcatttaacagattcacaaataggtgcctcgggattccataccatagatccagtagatcctaattcacaatacgatttagattcaccgatcaaatgatatccgctattacaagagtacgttatactagagccaaagtctactccaccaatatcaagttggccattatcgatatctcgaggcgatgggcatctccgtttaatacattgattaaagagtgtccatccagtacctgtacatttagcatatataggtcccattttttgctttctgtatccaggtagacatagatattctatagtgtctcctatgttgtaattagcattagcatcagtctccacactattcttaaatttcatattaatgggtcgtgacggaatagtacagcatgatagaacgcatcctattcccaacaatgtcaggaacgtcacgctctccaccttcatatttatttatccgtaaaaatgttatcctggacatcgtacaaataataaaaagcccatatatgttcgctattgtagaaattgtttttcacagttgctcaaaaacgatggcagtgacttatgagttacgttacactttggagtctcatctttagtaaacatatcataatattcgatattacgagttgacatatcgaacaaattccaagtatttgattttggataatattcgtattttgcatctgctataattaagatataatcaccgcaagaacacacgaacatctttcctacatggttaaagtacatgtataattctatccatttgtcttccttaactatatatttgtatagataattacgagtctcgtgagtaattccagtaattacatagatgtcgccgtcgtactctacagcataaactatactatgatgtctaggcatgggagacttttttatccaacgatttttagtgaaacattccacatcgtttaatactacatatttttcatacgtggtataaactccacccattacatatatatcatcgtttacgaataccgacgcgcctgaatatctaggagtaattaagtttggaagtcttatccatttcgaagtgccgtgtttcaaatattctgccacacccgttgaaatagaaaattctaatcctcctattacatataactttccatcgttaacacaagtactaacttctgattttaacgacgacatattagtaaccgttttccattttttcgtttcaagatctacccgcgatacggaataaacatgtctattgttaatcatgccgccaataatgtatagacaattatgtaaaacatttgcattatagaattgtctatctgtattaccgactatcgtccaatattctgttctaggagagtaatgggttattgtggatatataatcagagtttttaatgactactatattatgttttataccatttcgtgtcactggctttgtagatttggatatagttaatcccaacaatgatatagcattgcgcatagtattagtcataaacttgggatgtaaaatgttgatgatatctacatcgtttggatttttatgtatccactttaataatatcatagctgtaacatcctcatgatttacgttaacgttttcgtgggataagatagttgtcagttcatcctttgataattttccaaattctggatcggatgtcaccgcagtaatattgttgattatttctgacatcgacgcattatatagttttttaattccatatcttttagaaaagttaaacatccttatacaatttgtggaattaatattatgaatcatagtttttacacatagatctactacaggcggaacatcaattattatggcagcaactagtatcatttctacattgtttatggtgatgtttatcttcttccagcgtatatagtctaatagcgattcaaacgcgtgatagtttataccattcaatataatcgcttcatcctttagatggtgatcctgaattcgtttaaaaaaattatacggagatgccgtaataatttccttattcacttgtataatttccccattgatagaaaatatcacgctttccattcttgaagtactataagtaattatagtataatgtaaaggtttatatattcaatattttttataaaaaaatcattttgacattaattcctttttaaatttccgtctatcatctatagaaacgtattctatgaatttataaaatgcttttacgtgtcctatcgtaggcgatagaaccgctaaaaagcctatcgaatttctacaaaagaatctgttatatggtatagggagagtataaaacattaaatgtccgtacttattaaagtattcagtagccaatcctaactctttcgaatacttattaatggctcttgttctgtacgaatctatttttttgaacaacggacctagtggtatatcttgttctatgtatctaaaataatgtctgactagatccgttagtttaatatcctcagtcatcttgtctagaatggcaaatctaactgcgggtttaggctttagtttagtttttatatctacatctatgtctttatctaacaccaaaaatataatagctaatattttattacaatcatccggatattcttctacgatctcactaactaatgtttctttggttatactagtatagtcactatcggacaaataaagaaaatcagatgatcgatgaataatacatttaaattcatcatctgtaagatttttgagatgtctcattaaaatattattagggtcagtactcattatcattcggcagctattacttattttatttttctgtattttattatttttcaccatatagatcaatcattagatcatcaaaatatgtttcaatcatcctaaagagtatggtgaatgactcttcccatctaatttctgaacgttcaccaatgtctctagccactttggcactaatagcgatcattcgcttagcgtcttctatattattaactggttgattcaatctatctagcaatggaccgtcggacagcgtcattctcatgttcttaatcaatgtacatacatcgccgtcatctaccaattcatccaacaacataagctttttaaaatcatcattataataggtttgatcgttgtcatttctccaaagaatatatctaataagtagagtcctcatgcttagtaatttaactattttagttaacaactattttttatgttaaatcaattagtacaccgctatgtttaatacttattcatattttagtttttaggattgagaatcaatacaaaaaattaatgcatcattaattttagaaatacttagtttccacgtagttaatgaaacatttgaactcatcgtacaggacgttctcgtacaggacgtaactataaaccggtttatatttgttcaagatagatacaaatccgataactttttttacgaattctacgggatccactttaaaagtgtcataccgggttctttttattcttttaaacagatcaatggtgtgatgttgattaggtcttttacgaatttgatatagaatagcgttcacatatcctccataatggtcaatcgccatttgttcgtatgtcataaattctttaattatatgacactgtgtattatttagttcatccttgttcatcattaggaatctatccaaaatggcaattatactagaactataggtgcgttgtatacacatattgatgtgtctgtttatacaatccatgatatttggatccatgctactaccttcgggtaaaattgtagcatcatataccatttctagtactttaggttcattattatccattgcagaggacgtcatgatcgaatcctaaaaaaatatattatttttatgttattttgttaaaaataatcatcgaatacttcgtaagatactccttcatgaacataatcagttacaaaacgtttatatgaagtaaagtatctacgatttttacaaaagtccggatgcataagtacaaagtacgcgataaacggaataataatagatttatctagtctatctttttctatagctttcatagttagatacatggtctcagaagtaggattatgtaacatcagcttcgataaaatgactgggttatttagtcttacacattcgctcatacatgtatgaccgttaactacaaagtctacactaaaatgattgaacaatagatagtctaccattgtttcgtattcagatagtacagcgtagtacatagcatcttcacaaattatatcattgtctaatagatatttgacgcatcttatggatcccacttcaacagccatcttaaaatcggtagaatcatattgctttcctttatcattaataatttctaaaacatcatctctatcataaaagatacaaatattaactgtttgatccgtaataacattgctagtcgatagcaatttgttaataagatgcgctgggctcaatgtcttaataagaagtgtaagaggactatctccgaatttgttttgtttattaacatccgttgatggaagtaaaagatctataatgtctacattcttgactgttttagagcatacaatatggagaggtgtatttccatcatgatctggttttgagggactaattcctagtttcatcatccatgagattgtagaagcttttggattgtctgacataagatgtctatgaatatgatttttgccaaatttatccactatcctggcttcgaatccgatggacattatttttttaaacactctttctgaaggatctgtacacgccaacaacggaccacatccttcttcatcaaccgagttgttaatcttggctccatactgtaccaataaatttattctctctatgacttcatcatctgttcccgagagataatatagaggtgttttattatgtttatcacacgcgtttggatctgcgccgtgcgtcagcagcatcgcgactattctattattattaattttagaagctatatgcaatggataatttccatcatcatccgtctcatttggagagtatcctctatgaagaagttcttcgacaaatcgttcatctagtcctttaattccacaatacgcatgtagaatgtgataattatttccagaaggttcgatagcttgtagcatattcctaaatacatctaaatttttactattatatttggcataaagagatagataatactcggccgacataatgttgtccattgtagtataaaaattaatatttctatttctatttctgtatatttgcaacaatttactctctataacaaatatcataacttagttcttttatgtcaagaaggcactggtttagttcatctataaatgtcacgccataactaccacgcatgctatactcagaattatgataaagatatttatccttggggtgtaggtaatggggattaatctttgttggatcagtctctaagttaacacatgtcacacatgatccatttatagttatatcacacgatgatgatttatgaattgattccggaagatcgctatcgtattttgtggttccacaattcatttccatacatgttattgtcacactaatattatgatgaactttatctagccgctgagtggtaaacaacagaacagatagtttattatctttaccaacaccctcagccgctgccacaaatctctgatccgtatccatgatggtcatgtttatttctagtccgtatccagtcaacactatgttagcatttctgtcgatatagctttcactcatatgacactcaccaataatagtagaattaatgtcgtaatttacaccaatagtgagttcggcggcaaagtaccaataccggtaatcttgtcgaggaggacatatagtattcttgtattctaccgaatacccgagagatgcgatacaaaagagtaagactaatttgtaaaccatcttactcaaaatatgtaacaatagtacgatgcaatgagtaagacaataggaaatctatcttatatacacataattattctatcaattttaccaattagttagtgtaatgttaacaaaaatgtgggagaatctaattagtttttctttacacaattgacgtacatgagtctgagttccttgtttttgctaattatttcatccaatttattattcttgactatatcgagatcttttgtataggagtcagacttgtattcaacatgcttttctataatcattttagctatttcggcatcatccaatagtacattttccagattagcagaatagatattaatgtcgtatttgaacagagcctgtaacatctcaatgtctttattatctatagccaatttaatgtccggaatgaagagaagggaattattggtgtttgtcgacgtcatatagtcgagcaagagaatcatcatatccacgtgtccattttttatagtgatgtgaatacaactaaggagaatagccagatcaaaagtagatggtatctctgaaagaaagtaggaaacaatacttacatcattaagcatgacggcatgataaaatgaagttttccatccagttttcccatagaacatcagtctccaatttttcttaacaaacagttttaccgtttgcatgttaccactatcaaccgcataatacaatgcggtgtttcccttgtcatcaaattgtgaatcatccagtccactgaatagcaaaatctttactattttggtatcttccaatgtggctgcctgatgtaatggaaattcattctctagaagatttttcaatgctccagcgttcaacaacgtacatactagacgcacgttattatcagctattgcataatacaaggcactatgtccatggacatccgccttaaatgcatctttgctagagagaaagcttttcagctgcttagacttccaagtattaattcgtgacagatccatgtctgaaacgagacgctaattagtgtatattttttcattttttataattttgtcatattgcaccagaattaataatatctctaatagatctgattagtagatacatggctatcgcaaaacaacatatacacatttaataaaaataatatttattaagaaaattcagatttcacgtacccatcaatataaataaaataatgattccttacaccgtacccatattaaggagattccaccttacccataaacaatataaatccagtaatatcatgtctgatgatgaacacaaatggtgtattaaattccagtttttcaggagatgatctcgccgtagctaccataatagtagatgcctctgctacagttccttgttcgtcgacatctatctttgcattctgaaacattttataaatatataatgggtccctagtcatatgtttaaacgacgcattatctggattaaacatactaggagccatcatttcggctatcgacttaatatccctcttattttcgatagaaaatttagggagtttaagattgtacactttattccctaattgaaacgaccaatagtctaattttgcagccgtaatagaatctgtgaaatgggtcatattatcacctattgccaggtacatactaatattagcatccttatacggaaggcgtaccatatcatattcttcgtcatcgattgtgattgtatttccttgcaatttagtaactacgttcatcatgggaaccgttttcgtaccgtacttattagtaaaactagcattgcgtgttttagtgatatcaaacggatattgccatatacctttaaaatatatagtattaatgattgcccatagagtattattgtcgagcatattagaatctactacattagacataccggatctacgttctactatagaattaattttattaaccgcatctcgtctaaagtttaatctatataggccgaatctatgatattgttgataatacgacggtttaatgcacacagtattatctacgaaactttgataagttagatcagtgtacgtatatttagatgttttcagcttagctaatcctgatattaattctgtaaatgctggacccagatctctttttctcaaatccatagtcttcaataattctattctagtattacctgatgcaggcaatagcgacataaacatagaaaacgaataaccaaacggtgagaagacaatattatcatcttgaatatttttatacgctactataccggcattggtaaatccttgcagacgataggtagacactgaacacgttaacgatagtatcaataacgcaatcatgattttatggtattaataattaaccttatttttatgttcggtataaaaattattgatgtctacacatccttttgtaattgacatctatatatccttttgtataatcaactctaatcactttaacttttacagttttccctaccagtttatccctatattcaacatatctatccatatgcatcttaacactctctgccaagatagcttcaaagtgaggatagtcaaaaagataaatatatagagcataatccttctcgtatactctgccctttattacatcacccgcattgggcaacgaataacaaaatgcaagcatcttgttaacgggctcgtaaattgggataaaaattatgtttttatatctattttattcaagagaatattcaggaatttctttttccggttgtatctcatcgcagtatatatcatttgtacattgtttcatattttttaatagtctacaccttttagtaggactagtatcgtacaattcatagctgtattttgaattccaatcacgcataaaaatatcttccaattgttgacgaagacctaatccatcatccggtgtaatattaatagatgctccacatgtatccgtaaagtaatttcctgtccaatttgaggtacctatatacgccgttttatcggttaccatatatttggcatggtttaccctagaatacggaatgggaggatcagcatctggtacaataaatagctttacttctatatttatgtttttagattttagcatagcgatagatcttaaaaagtttctcatgataaacgaagatcgttgccagcaactaatcaatagcttaactgacacttgtctgtctatagcggctcttcttaattcatcttctatataaggccaaaacaaaatattgcctgccttcgaataaataatagggataaagttcataacagatacataaacgaatttactcgcatttctgatacatgacaataaagcggttaaatcattggttctttccatagtacatagttgttgcggtgcagaagcaataaatacagagtgtggaacgccgcttacgttaatactaagaggatgatctgtattataatacgacggataaaagtttttccaattatatggtagattgttaactccaagataccagtatacctcaaaaatttgagtgagatccgctgccaagttcctattattgaagatcgcaatacccaattctttgacctgagttagtgatctccaatccatgttagcgcttcctaaataaatatgtgtattatcagatatccaaaattttgtatgaagaactcctcctaggatatttgtaatatctatgtatcgtacttcaactccggccatttgtagtctttcaacatcctttaatggtttgttagatttattgacggctactctaactcgtactcctcttttgggtaattgtacaatcttgtttaatattatcgtgccgaaattcgtacccacttcatccgataaactccaataaaaagatgatatatctagtgtttttgtggtattggatagaatttccctccacatgttaaatgtagacaaatatactttatcaaattgcatacctataggaatagtctctgtaatcactgcgattgtattatccggattcattttatttgttaaaagaataatcctatatcacttcactctattaaaaatccaagtttctatttctttcatgactgattttttaacttcatccgtttccttatgaagatgatgtttggcaccttcataaatttttatttctctattacaatttgcatgttgcatgaaataatatgcacctaaaacatcgctaatcttattgtttgttccctggagtatgagagtcggggggtgttaatcttggaaattatttttctaaccttgttggtagccttcaagacctgactagcaaatccagccttaattttttcatgattgattaatgggtcgtattggtatttataaactttatccatatctctagatactgattctggacatagctttccgactggcgcatttagtgtgatggttcccataagtttggcagctagcagattcagttttgaaacagcatctgcattaactagaggagacattagaatcattgctgtaaacaagtttggattatcgtaagaggctagctcccatggaatgacccaataagtagatttaatagttaccacgtgctgtaccaaagtcatcaatcatcattttttcaccattacttcttccatgtccaatatgatcatgtgagaatactaaaattcctaacgatgatatgttttcagctagttcgtcataacgtccagaatgtttaccagctccatgacttatgaatactaatgccttaggatatgtaataggtttccaatatatgtaatcattgtccagattgaacatacagtttgcactcatgattcacgttatataactatcaatattaacagttcgtttgatgatcatattatttttatgttttattgataattgtaaaaacatacaattaaatcaatatagaggaaggagacggctactgtcttttgtgagatagtcatggcgactaaattagattatgaggatgctgttttttactttgtggatgatgataaaatatgtagtcgcgactccatcatcgatctaatagatgaatatattacgtggagaaatcatgttatagtgtttaacaaagatattaccagttgtggaagactgtacaaggaattgatgaagttcgatgatgtcgctatacggtactatggtattgataaaattaatgagattgtcgaagctatgagcgaaggagaccactacatcaattttacaaaagtccatgatcaggaaagtttattcgctaccataggaatatgtgctaaaatcactgaacattggggatacaaaaagatttcagaatctagattccaatcattgggaaacattacagatctgatgaccgacgataatataaacatcttgatactttttctagaaaaaaaattgaattgatgatataggggtcttcataacgcataattattacgttagcattctatatccgtgttaaaaaaaattatcctatcatgtatttgagagttttatatgtagcaaacatgatagctgtgatgccaataagctttagatattcacgcgtgctagtgttagggatggtattatctggtggtgaaatgtccgttatataatctacaaaataatcatcgcatatagtatgcgatagtagagtaaacatttttatcgtttctactgggttcatacatcgtctacccaattcggttataaatgaaattgtcgccaatcttacacccaaccccttgttatccattagtatagtattaacttcgttatttatgtcataaactgtaaatgattttgtagatgccatatcatacatgatattcatgtccctattataatcattactaactttatcacaatatatgttgataatatctatatatgatctagtctttgtgggcaactgtctatacaagtcgtctaaacgttgtttactcatatagtatcgaacagccatcattacatggtcccgttccgttgatagataatcgagtatgttagtggacttgtcaaatctatataccatattttctggaagtggatatacatagtcgtgatcaacattattgctagcctcatcttctatatcctgtactataccattatctatatcatctacataatctacgatattattacacataaacatcgacaacatactattgtttattatctaagtcctgttgatccaaacccttgatctcctctatttgtactatctagagattgtacttcttccagttctggataatatatacgttgatagattagctgagctattctatctccagtatttacattaaacgtacattttccattattaataagaatgactcctatgtttcccctataatcttcgtctattacaccgcctcctatatcaatgccttttagggacagaccagacctaggagctattctaccatagcagaacttaggcatggacatactaatatctgtcttaattaactgtcgttctcctggagggatagtataatcgtaagcgctatataaatcatatccggcggcgtaaggtgattgcctagtaggagatttagctctgttagtttccttaacaaatctaactggtgagttaatattcatgttgaacataaaactaatattttatttcaaaattatttaccatcccatatattccatgaataagtgtgatgattgtacacttctatagtatctatatacgattcacgataaaatcctcctatcaatagcagtttattatccactatgatcaattctggattatccctcggataaataggatcatctatcagagtccatgtattgctggattcacaataaaattccgcatttctaccaaccaagaataaccttctaccgaacactaacgcgcatgatttataatgaggataataagtggatggtccaaactgccactgatcatgattgggtagcaaatattctgtagttgtatcagtttcagaatgtcctcccattacgtatataacattgtttatggatgccactgctggattacatctaggtttcagaagactcggcatattaacccaagcagcatccccgtggaaccaacgctcaacagatgtgggatttggtagacctcctactacgtataatttattgttagcgggtatcccgctagcatacagtctggggctattcatcggaggaattggaatccaattgtttgatatataatttaccgctatagcattgttatgtatttcattgttcatccatccaccgatgagatatactacttctccaacatgagtacttgtacacatatggaatatatctataatttgatccatgttcataggatactctatgaatggatacttgtatgatttgcgtggttgtttatcacaatgaaatattttggtacagtctagtatccattttacattatttatacctctgggagaaagataatttgacctgattacatttttgataaggagtagcagatttcctaatttatttcttcgctttatataccacttaatgacaaaatcaactacataatcctcatctggaacatttagttcatcgctttctagaataagtttcatagatagataatcaaaattgtctatgatgtcatcttccagttccaaaaagtgtttggcaataaagtttttagtatgacataagagattggatagtccgtattctatacccatcatgtaacactcgacacaatattcctttctaaaatctcgtaagataaagtttatacaagtgtagatgataaattctacagaggttaatatagaagcacgtaataaattgacgacgttatgactatctatatatacctttccagtatacgagtaaataactatagaagttaaactgtgaatgtcaaggtctagacaaacccttgtaactggatctttatttttcgtgtatttttgacgtaaatgtgtgcgaaagtaaggagataactttttcaatatcgtagaattgactattatattgccacctatagcatcaataattgttttgaatttcttagtcatagacaatgctaatatattcttacagtacacagtattaacaaatatcggcatttatgtttctttaaaagtcaacatctaaagaaaaatgattatcttcttgagacataactcccattttttggtattcacccacacgtttttcgaaaaaattagtttttccttccaatgatatattttccatgaaatcaaacggattggtaacattataaatttttttaaatcccaattcagaaatcaatctatccgcgacgaattctatatatgttttcatcatttcacaattcattcctataagtttaactggaagagccgcagtaagaaattcttgttcaatggataccgcatctgttataatagatctaacggtttcttcactcggtggatgcaataaatgtttaaacatcaaacatgcgaaatcgcagtgcagaccctcgtctctactaattagttcgttggaaaacgtgagtccgggcattaggccacgctttttaagccaaaatatggaagcgaatgatccagaaaagaagattccttctactgcagcaaaggcaataagtctctctccataaccggcgctgtcatgtatccacttttgagcccaatcggccttcttttttacacaaggcatcgtttctatggcattaaagagatagtttttttcattactatctttaacataagtatcgatcaaaagactatacatttccgaatgaatgttttcaatggccatctgaaatccgtagaaacatctagcctcggtaatctgtacttctgtacaaaatcgttccgccaaattttcattcactattccgtcactggctgcaaaaaacgccaatacatgttttataaaatatttttcgtctggtgttagtttattccaatcattgatatctttagatatatctacttcttccactgtccaaaatgatgcctctgcctttttatacatgttccagatgtcataatattggattgggaaaataacaaatctatttggatttggtgcaaggatgggttccataactaaattaacaataacaataaattttttttcagttatctatatgcctgtacttggatcttttgtacatcgatatcgccgcaatcactacaataattacaagtattattgatagcattgttattagtactatcataattaaattatcgacattcatgggtgctgaataatcgttattatcatcattatcattttgtaattgtgacatcatactagataaatcgtttgcgagattgttgtgggaagcgggcatggaggatgaattatcgttattattatttaacgcctcccattcggattcacaaatgttacgcacattcaacattttatggaaactataattttgtgaaaacagataacaagaaaactcgtcatcgttcaaatttttaacgatagtaaaccgattaaacgtcgagctaatttctaacgctagcgactctgttggatatgggtttccagatatatatcttttcagttcccctacgtatctataatcatctgtaggaaatggaagatatttccatttatctactgttcctaatatcatatgtggtggtgtagtagaaccattaagcgcgaaagatgttatttcgcatcgtattttaacttcgcaataatttctggttagataacgcactctaccagtcaagtcaatgatattagcctttacagatatattcatagtagttgtaacgatgactccatcttttagatgcgatactcctttgtatgtaccagaatcttcgtaccgcaaactcgatatatttaaacaagttaatgagatattaacgcgttttatgaatgatgatatataaccagaagttttatcctcggtggctagcgctataaccttatcattataataccaactagtgtgattaatatgtgacacgttagtgtgggtacaaatatgtacattatcgtctacgtcgtattcgatacatccgcatacagccaacaaatataaaatgacaaatactctaacgccgttcgtacccatcttgatgcggtttaataaatgttttgatttcaatttattgtaaaaaaagattcggttttatactgttcgatattctcattgcttatattttcatctatcatctccacacagtcaaatccgtggttagcatgcacctcatcaaccggtaaaagactatcggactcttctatcattataactctagaatatttaatttggtcattattaatcaagtcaattatcttatttttaacaaacgtgagtattttactcattttttataaaaacttttagaaatatacagactctatcgtgtgtctatatcttctttttatatccaatgtatttatgtctgatttttcttcatttatcatatataatggtccaaattctacacgtgcttcggattcatccagatcattaaggttcttataattgtaacatccttctcttccctcttctacatcttccttcttattcttattcttagcgtcacagaatctaccacagcaggatcccatgacgagcgtcatattaaactaatccattttcaattataatatacgattagtaatgaccattaaaataaaaaatattcttcataaccggcaagaaagtgaaaagttcacattgaaactatgtcagtagtatacatcatgaaatgatgatatatatatactctattttggtggaggattatatgatataattcgtggataatcattcttaagacacatttcttcattcgtaaatcttttcacgttaaatgagtgtccatattttgcaatttcttcatatgatggcggtgtacgtggacgaagctgctcctgttcttgttgtagtcgccgactgtcgtgtttgcgtttagatccctccattatcgcgattgcgtagatggagtactattatataccttgtaattaaatttttttattaattaaacgtataaaaacgttccgtatctgtatttaagagccagatttcgtctaatagaacaaatagctacagtaaaaataactagaataattgctacacccactagaaaccacggatcgtaatacggcaatcggttttcgataataggtggaacgtatattttatttaaggacttaacaattgtctgtaaaccacaatttgcttccgcggatcctgtattaactatctgtaaaagcatatgttgaccgggcggagccgaacattctccgatatctaatttctgtatatctataatattattaacctccgcatacgcattacagttcttttctagcttggataccgcactaggtacatcgtctagatctattcctatttcttcagcgatagctcttctatccttttccggaagcaatgaaatcacttcaataaatgattcaaccatgagtgtgaaactaagtcgagaattactcatgcatttgttagttattcggagcgcgcaatttttaaactgtcctataacctctcctatatgaatagcacaagtgacattagtagggatagaatgttgagctaatttttgtaaataactatctataaaaagattatacaaagttttaaactctttagtttccgccatttatccagtctgagaaaatgtctctcataataaatttttccaagaaactaattgggtgaagaatggaaacctttaatctatatttatcacagtctgttttggtacacatgatgaattcttctaatgctgtactaaattcgatatctttttcgatttctggatatgtttttaataaagtatgaacaaagaaatggaaatcgtaataccagttatgttcaactttgaaattgttttttattttcttgttaatgattccagccacttgggaaaagtcaaagtcgtttaatgccgatttaatacgttcattaaaaacaaactttttatcctttagatgaattattattggttcattggaatcaaaaagtaagatattatcgggtttaagatctgcgtgtaaaaagttgtcgcaacagggtagttcgtagattttaatgtataacagagccatctgtaaaaagataaactttatgtattgtaccaaagatttaaatcctaatttgatagctaactcggtatctactttatctgccgaatacagtgctaggggaaaaattataatatttcctctttcgtattcgtagttagttctcttttcatgttcgaaaaagtgaaacatgcggttaaaatagtttataacattaatattactgttaataactgccggataaaagtgggatagtaatttcacgaatttgatactgtcctttctctcgttaaacgcctttaaaaaaactttagaagaatatctcaatgagagttcctgaccatccatagtttgtatcaataatagcaacatatgaagaacccgtttatacagagtatgtaaaaatgttaatttatagtttaatcccatggcccacgcacacacgattaattttttttcatctccctttagattgttgtatagaaatttgggtactgtgaactccgccgtagtttccatgggactatataattttgtggcctcgaatacaaattttactacatagttatctatcttaaagactataccatatcctcctgtagatatgtgataaaaatcgtcgtttataggataaaatcgtttatccttttgttggaaaaaggatgaattaatgtaatcattctcttctatctttagtagtgtttccttattaaaattcttaaaataatttaacaatctaactgacggagcccaattttggtgtaaatctaattgggacattatgttgttaaaatacaaacagtctcctaatataacagtatctgataatctatggggagacatccattgatattcaggggatgaatcattggcaacacccatttattgtacaaaaagccccaatttacaaacgaaagtccaggtttgatagagacaaacaattaactattttgtctctgtttttaatttctttggtaatgaaattattcacaatatcagtatcttctttatctaccagagattttactaacttgataaccttggctgtctcattcaatagggtagtaatatttgtatgtgtgatattgatatctttttgaattgtttcttttagaagtgattctttgatggtgccagcatacgaattacaataatgcagaaactcagttaacatgcaggaattatagtaagccaattccaattgttgcctgtattgtattagagtattaatatgcgcaatggtgtccttgcgtttctctgatagaatgcgagcagcgattttggcgttatcatttgacgatatttctggaatgacgaatcctgtttctactaactttttggtaggacaaagtgaaacaatcaagaagatagcttctcctcctatttgtggaagaaattgaactcctctagatgatctactgacgatagtatctccttgacagatattggaccgaattacagaagtacctggaatgtaaagccctgaaaccccctcattttttaagcagattgttgccgtaaatcctgcactgtgaccaagatagagagctcctttggtgaatccatctctatgtttcagtttaaccaagaaacagtcagctggtctaaaatttccatctctatctaatacagcatctaacttgatgtcaggaactatgaccggtttaatgttatatgtaacattgagtaaatccttaagttcataatcatcactgtcatcagttatgtacgatccaaacaatgtttctactggcatagtggatacgaagatgctatccatcagaatgtttccctgattagtattttctatatagctattcttctttaaacgattttccaaatcagtaactatgttcatttttttaggagtaggacgcctagccagtatggaagaggattttctagatcctctcttcaacatctttgatctcgatggaatgcaaaaccccatagtgaaacaaccaacgataaaaataatattgtttttcactttttataattttaccatctgactcatggattcattaatatctttataagagctactaacgtataattctttataactgaactgagatatatacaccggatctatggtttccataattgagtaaatgaatgctcggcaataactaatggcaaatgtatagaacaacgaaattatactagagttgttaaagttaatattttctatgagctgttccaataaattatttgttgtaactgcgttcaagtcataaatcatcttgatactatccagtaaaccgtgtttaagttctggaatattatcatcccattgtaaagcccctaattcgactatcgaatatcctgctctgatagcagtttcaatatcgacggacgtcaatactgtaataaaggtggtagtattgtcatcatcgtgataaactacgggaatatggtcgttagtaggtacggtgactttacacaacgcgatatataactttccttttgtaccatttttaacgtagttgggacgtcctgcagggtattgttttgaagaaatgatatcgagaacagatttgatacgatatttgttggattcctgattattcactataatataatctagacagatagatgattcgataaatagagaaggtatatcgttggtaggataatacatccccattccagtattctcggatactctattgatgacactagttaagaacatgtcttctattctagaaaacgaaaacatcctacatggactcattaaaacttctaacgctcctgattgtgtctcgaatgcctcgtacaaggatttcaaggatgccatagattctttgaccaacgatttagaattgcgtttagcatctgatttttttattaaatcgaatggtcggctctctggtttgctaccccaatgataacaatagtcttgtaaagataaaccgcaagaaaatttatacgcatccatccaaataaccctagcaccatcggatgatattaatgtattattatagattttccatccacaattattgggccagtatactgttagcaacggtatatcgaatagattactcatgtaacctactagaatgatagttcgtgtactagtcataatatctttaatccaatctaagaaatttaaaattagattttttacactgttaaagttaacaaaggtattacccggatacgtggatatcatatatggcattggtccattatcagtaatagctccataaactgatacggcgatggtttttatatgtgtttgatctaacgaggaagaaattcgcgcccacaattcatctctagatatgtatttaatatcaaacggtaacacatcaatttcgggacgcgtatatgtttctaaatttttaatccaaatataatgatgacctatatgccctattatcatactgtcaactatagtacacctagagaacttacgatacatctgtttcctataatcgttaaattttacaaatctataacatgctaaaccttttgacgacagccattcattaatttctgatatggaatctgtattctcgataccgtattgttctaaagccagtgctatatctccctgttcgtgggaacgctttcgtataatatcgatcaacggataatctgaagtttttggagaataatatgactcatgatctatttcgtccataaacaatctagacataggaattggaggcgatgatcttaattttgtgcaatgagtcgtcaatcctataacttctaatcttgtaatattcatcatcgacataatactatctatgttatcatcgtatattagtataccacggccttcttcatttcgtgccaaaataatatacagtcttaaataattacgcaatatctcaatagtttcataattgttagctgttttcatcaagatttgtaccctgtttaacatgatggcgttctatacgtctctattttcttttttttaaatttttaacgatttactgtggctagatacccaatctctctcaaatatttttttagcctcgcttacaagctgtttatctatactattaaaactgacgaatccgtgattttggtaatgggttccgtcgaaatttgccgaagtgatatgaacatattcgtcgtcgactatcaacaattttgtattattctgaatagtgaaaaccttcacagatagatcattttgaacacacaacgcgtctagacttctggcggttgccatagaatatacgtcgttcttatcccaattaccaactagaagtctgatcttaactcctctattaatggctgcttctataatggagttgtaaatgtcgggccaatagtagctattaccgtcgacacgtgtagtgggaactatggccaaatgttcaatatctatactagtcttagccgacttgagtttatcaataactacatcggtatctagatctctagaatatcccaataggtgttccggagaatcagtaaagaacactccacctataggattcttaatatgatacgcagtgctaactggcaaacaacaagccgcagagcataaattcaaccatgaattttttgcgctattaaaggctttaaaagtatcaaatcttctacgaagatctgtggccagcgggggataatcagaatatacacctaacgttttaatcgtatgtatagatcctccagtaaatgacgcgtttcctacataacatctttcatcatctgacacccaaaaacaaccgagtagtagtcccacattattttttttatctatattaacggttataaaatttatatccgggcagtgactttgtagctctcccagatttcttttccctcgttcatctagcaaaactattattttaatccctttttcagatgcctcttttagtttatcaaaaataagcgctcccctagtcgtactcagaggattacaacaaaaagatgctatgtatatatatttcttagctagagtgataatttcgttaaaacattcaaatgttgttaaatgatcggatctaaaatccatattttctggtagtgtttctaccagcctacattttgctcccgcaggtaccgatgcaaatggccacatttagttaacataaaaacttatacatcctgttctatcaacgattctagaatatcatcggctatatcgctaaaattttcatcaaagtcgacatcacaacctaactcagtcaatatattaagaagttccatgatgtcatcttcgtctatttctatatccgtatccattgtagattgttgaccgattatcgagtttaaatcattactaatactcaatccttcagaatacaatctgtgtttcattgtaaatttataggcggtgtatttaagttggtagattttcaattatgtatcaatatagcaacagtagttcttgctcctccttgattctagcatcctcttcattattttcttctacgtacataagcatgtccaatacgttagacaacacaccgacgatggcggccgccacagacacgaatatgactagaccgatgaccatttaaaaacccctctctagctttcacttaaactgtatcgattattcttttagaacatgtataatataaaaacattattctatttcgaatttaggcttccaaaaatttttcatccgtaaaccgataataatatatatagacttgttaatagtcggaataaatagattaatgcttaaactatcatcatctccacgattagagatacaatatttacattttttttgctgtttcgaaactttatcaatacacgttaatacaaacccaggaaggagatattgaaactgaggctgttgaaaatgaaacggtgaatacaataattcagataatgtaaaatcatgattccgtattctgatgatattagaactgctaatggatgtcgatggtatgtatctaggagtatctattttaacaaagcatcgatttgctaatatacaattatccttttgattaattgttattttattcatattcttaaaaggtttcatatttatcaattcttctacattaaaaatttccatttttaatttatgtagcccccgcaatactcctcattacgtttcattttttgtctataatatccattttgttcatctcggtacatagattatccaattgagaagcgcatttagtagttttgtacattttaagtttattgacgaatcgtcgaaaactagttatagttaacattttattatttgataccctgatattaatacccctgccgttactattatttataactgatgtaatccacgtaacattagaattaattatcgatagtaatgcatcgacgcttccaaaattgtctattataaactcaccgataatttttttattgcatgttttcatattcattaggattatcaaatctttaatcttactacgattgtatgcgttgatattgcaagacgtcattctaaaagacggaggatctccatcaaatgccagacaatcacgtacaaagtacatggaaataggttttgttctattgcgcatcatagatttatatagaacacccgtagaaatactaatttgttttactctataaaatactaatgcatctatttcatcgttttgtataacgtctttccaagtgtcaaattccaaatttttttcattgatagtaccaaattcttctatctctttaactacttgcatagataggtaattacagtgatgcctacatgccgttttttgaaactgaatagatgcgtctagaagcgatgctacgctagtcacaatcaccactttcatatttagaatatatgtatgtaaaaatatagtagaatttcattttgtttttttctatgctataaatgaattctcattttgcatctgctcatactccgttttatatcaataccaaagaaggaagatatctggttctaaaagccgttaaagtatgcgatgttagaactgtagaatgcgaaggaagtaaagcttcctgcgtactcaaagtagataaaccctcatcgcccgcgtgtgagagaagaccttcgtccccgtccagatgcgagagaatgaataaccctggaaaacaagttccgtttatgaggacggacatgctacaaaatatgttcgcggctaatcgcgacaacgtggcgtcgagacttttgaactaaaatacaattatatccttttcgatattaataaatccgtgtcgtccaggttttttatctctttcagtatgtgaatagataggtattttatctctattcatcatcgaatttaagagatccgataaacattgtttgtattctccagatgtcagcatctgatacaacaatatatgtgcacataaacctctggcacttatttcatgtaccttccccttatcactaaggagaatagtatttgagaaatatgtatacatgatattatcatgaattagatatacagaatttgtaacactctcgaaatcacacgatgtgtcggcgttaagatctaatatatcactcgataacacattttcatctagatacactagacattttttaaagctaaaatagtctttagtagtgacagtaactatgcgattattttcatcgatgatacatttcatcggcatattattacgcttaccatcaaagactataccatgtgtatatctaacgtattctagcatggttgccatacgcgcattaaacttttcaggatctttggatagatcttccaatctatctatttgagaaaacatttttatcatgttcaatagttgaaacgtcggatccactatatagatattatctataaagattttaggaactacgttcatggtatcctggcgaatattaaaactatcaatgatatgattatcgttttcatcttttatcaccatatagtttctaagatatgggattttacttaatataatattatttcccgtgataaattttattagaaaggccaaatctataagaaaagttctagaattagtctgaagaatatctatatcgccgtaccgtatatttggattaattagatatagagaatatgatccgtaacatatacaacttttattatggcgtctaagatattcttccatcaacttattaacatttttgactagggaagatacattatgacgtcccattacttttgccttgtctattactgcgacgttcatagaatttagcatatctcttgccaattcttccattgatgttacattataagaaattttagatgaaattacatttggagctttaatagtaagaactcctaatatgtccgtgtatgtggtcactaatacagattgtagttctataatcgtaaataatttacctatattatatgtttgagtctgtttagaaaagtagctaagtatacgatcttttatttctgatgcagatgtattaacatcggaaaaaaatctttttttattcttttttactaaagatacaaatatgtctttgttaaaaacagttattttttgaatatttctagcttgtaattttaacatatgatattcgttcacactaggtactctgcctaaataggtttctataatctttaatgtaatattaggaagagtattctgatcaggattcctattcattttgaggatttaaaactctgattattgtctaatatggtctctacgcaaactttttcacagagcgatagagtttttgataactcgtttttcttaagaaatataaaactactgtctccagagctcgctctatcttttattttatttaattcgatacaaactcctgatactggttcagaaagtaattcattaattttcagtcctttatagaagatatttaatatagataatacaaaattttcagttcttgatatcgatctgattgatcctagaactagatatattaataacgtgctcattaggcagtttatggcagcttgataattagatatagtatattccagttcatatttattagataccgcattgcccagattttgatattctatgaattcctctgaaaataaatccaaaataactaaacattctattttttgtggattagtgtactctcttccctctatcatgttcactactggtgtccacgatgataaatatctagagggaatataatatagtccataggatgccaatctagcaatgtcgaataactgtaatttgattcttcgttcttcattatgaattgattcttgaggtataaacctaacacaaattatattattagacttttcgtatgtaatgtctttcatgttataagtttttaatcctggaatagaatctattttaatgaggcttttaaacgcagagttctccaacgagtcaaagcataatactctgttgtttttcttatatacgatgttacgattttcttctttgaatggaataggtttttgaattagtttataattacaacataatagataaggaagtgtgcaaatagtacgcggaaaaaacataatagctcccctgttttcatccatggttttaagtaaatgatcactggcttctttagtcaatggatattcgaacattaaccgtttcatcatcattggacagaatccatatttcttaatgtaaagagtgatcaaatcattgtgtttattgtaccatcttgttgtaaatgtgtattcggttatcggatctgctcctttttctattaaagtatcgatgtcgatctcgtctaagaattcaactatatcgacatatttcatttgtatacacataaccattactaacgtagaatgtataggaagagatgtaacgggaacagggtttgttgattcgcaaactattctaatacataattcttctgttaatacgtcttgcacgtaatctattatagatgccaagatatctatataattattttgtaagatgatgttaactatgtgatctatataagtagtgtaataattcatgtatttcgatatatgttccaactctgtctttgtgatgtctagtttcgtaatatctatagcatcctcaaaaaatatattcgcatatattcccaagtcttcagttctatcttctaaaaaatcttcaacgtatggaatataataatctattttacctcttctgatatcattaatgatatagtttttgacactatcttctgtcaattgattcttattcactatatctaagaaacggatagcgtccctaggacgaactactgccattaatatctctattatagcttctggacataattcatctattataccagaattaatgggaactattccgtatctatctaacatagttttaagaaagtcagaatctaagacctgatgttcatatattggttcatacatgaaatgatctctattgatgatagtgactatttcattctctgaaaattggtaactcattctatatatgctttccttgttgatgaaggatagaatatactcaatagaatttgtaccaacaaactgttctcttatgaatcgtatatcatcatctgaaataatcatgtaaggcatacatttaacaattagagacttgtctcctgttatcaatatactattcttgtgataatttatgtgtgaggcaaatttgtccacgttctttaattttgttatagtagatatcaaatccaatggagctacagttcttggcttaaacagatatagtttttctggaacgaattctacaacattattataaaggactttgggtagataagtgggatgaaatcctattttaattaatgcgatagccttgtcctcgtgcagatatccaaacgcttttgtgatagtatggcattcattgtctagaaacgctctacgaatatctgtgacagatatcatctttagagaatatactagtcgcgttaatagtactacaatttgtattttttaatctatctcaataaaaaaattaatatgtatgattcaatgtataactaaactactaactgttattgataactagaatcagaatctaatgatgacgtaaccaagaagtttatctactgccaatttagctgcattatttttagcatctcgtttagattttccatctgccttatcgaatactcttccgtcgatgtctacacaggcataaaatgtaggagagttactaggccccactgattcaatacgaaaagaccaatctctcctagtaatttggcagtactcattaataacggtgacagggttagcacctttccaatcaataatttttttagccggaataacatcatcaaaagacttatgatcctctctcattgatttttcgcgggatacatcatctattatgacgtcagccatagcatcagcatccggcttatccgcctccgttgtcataaaccaacgaggaggaatatcgtcggagctgtacaccatagcactacgttgaagatcgtacagagctttattaacttctcgcttctccatattaagttgtctagttagttgtgcagcagtagctccttcgattccaatggttttaatagcctcacacacaatctctgcgttagaacgctcgtcgatatagattttagacatttttagagagaactaacgcaatcagtaataaaactaatttattttatcattttttttattcatcatcctctggtggttcgtcgtttctatcgaatgtagctctgattaacccgtcatctataggtgatgctggttctggagattctggaggagatggattattatctggaagaatctctgttatttccttgttttcatgtatcgattgcgttgtaacattaagattgcgaaatgctctaaatttgggaggcttaaagtgttgtttgcaatctctacacgcgtgtctaactagtggaggttcgtcagcggctctagtttgaatcatcatcggcgtagtattcctacttttacagttaggacacggtgtattgtatttctcgtcgagaacgttaaaataatcgttgtaactcacatcctttattttatctatattgtattctactcctttcttaatgcattttataccgaataagagatagcgaaggaattctttttcggtgccgctagtacccttaatcatatcacatagtgttttatattccaaatttgtggcaatagacggtttatttctatacgatagtttgtttctggaatcctttgagtattctataccaatattattctttgattcgaatttagtttcttcgatattagattttgtattacctatattcttgatgtagtactttgatgatttttccatggcccattctattaagtcttccaagttggcatcatccacatattgtgatagtaattctcggatatcagtagcggttaccgccattgatgtttgttcattggatgagtaactactaatgtatacattttccatttataacacttatgtattaactttgttcatttatattttttcattattatgttgatattaacaaaagtgaatatatatatgttaataattgtattgtggttatacggctacaattttataattagtgaaagtcagtgtccgatgatcaatgacgatagctttactctgaaaagaaagtatcaaatcgatagtgcggagtcaacaataaaaatggataagaagaggacaaagtttcagaatagagccaaaatggtaaaagaaataaatcagacaataagagcagcacaaactcattacgagacattgaaactaggatacataaaatttaagagaatgattaggactactactctagaagatatagcaccatctattccaaataatcagaaaacttataaactattctcggacatttcagccatcggcaaagcatcacggaatccaagtaagatggtatatgctctgctgctttacatgtttcccaatttgtttggagatgatcatagattcattcgttatagaatgcatccaatgagtaaaatcaaacacaagatcttctctcctttcaaacttaatcttattagaatattagtggaagaaagattctataataatgaatgcagatctaataaatggagaataattggaacacaagttgataaaatgttgatagctgaatctgataaatatacaatagatgcaaggtataacctaaaacccatgtatagaatcaagggaaaatctgaagaagataccctctttatcaaacagatggtagaacaatgtgtgacatcccaggaattggtggaaaaagtgttgaagatactgtttagagatttgttcaagagtggagaatacaaagcgtacagatacgatgatgatgtagaaaatggatttattggattggatacactaaaattaaacattgttcatgatatagttgaaccatgtatgcctgttcgtaggccagtggctaagatactgtgtaaagaaatggtaaataaatactttgagaatccgctacatattattggtaaaaatcttcaagagtgcattgactttgttagtgaataggcatttcatctttctccaatactaattcaaattgttaaattaataatggatagtataaatagttattagtgataaaatagtaaaaataattattagaataagagtgtagtatcatagataactctcttctataaaaatggattttattcgtagaaagtatcttatatacacagtagaaaataatatagattttttaaaggatgatacattaagtaaagtaaacaattttaccctcaatcatgtactagctctcaagtatctagttagcaattttcctcaacatgttattactaaggatgtattagctaataccaatttttttgttttcatacatatggtacgatgttgtaaagtgtacgaagcggttttacgacacgcatttgatgcacccacgttgtacgttaaagcattgactaagaattatttatcgtttagtaacacaatacaatcgtacaaggaaaccgtgcataaactaacacaagatgaaaaatttttagaggttgccaaatacatggacgaattaggagaacttataggcgtaaattatgacttagttcttaatccattatttcacggaggggaacccatcaaagatatggaaatcatttttttaaaactgtttaagaaaacagacttcaaagttgttaaaaaattaagtgttataagattacttatttgggcttacctaagcaagaaagatacaggcatagagtttgcggataatgatagacaagatatatatactctatttcaacaaactggtagaatcgtccatagcaatctaacagaaacgtttagagattatatctttcccggagataagactagctattgggtgtggttaaacgaaagtatagctaatgatgcggatattgttcttaatagacacgccattaccatgtatgataaaattcttagttatatatactctgagataaaacaaggacgcgttaataaaaacatgcttaagttagtttatatctttgagcctgaaaaagatatcagagaacttctgctagaaatcatatatgatattcctggagatatcctatctattattgatgcaaaaaacgacgattggaaaaaatattttattagtttttataaagctaattttattaacggtaatacatttattagtgatagaacgtttaacgaggacttattcagagttgttgttcaaatagatcccgaatatttcgataatgaacgaattatgtctttattctctacgagtgctgcggacattaaacgatttgatgagttagatattaataacagttatatatctaatataatttatgaggtgaacgatatcacattagatacaatggatgatatgaagaagtgtcaaatctttaacgaggatacgtcgtattatgttaaggaatacaatacatacctgtttttgcacgagtcggatcccatggtcatagagaacggaatactaaagaaactgtcatctataaaatccaagagtagacggctgaacttgtttagcaaaaacattttaaaatattatttagacggacaattggctcgtctaggtcttgtgttagatgattataaaggagacttgttagttaaaatgataaaccatcttaagtctgtggaggatgtatccgcattcgttcgattttctacagataaaaaccctagtattcttccatcgctaatcaaaactattttagctagttataatatttccatcatcgtcttatttcaaaggtttttaagagataatctatatcatgtagaagaattcttggataaaagcatccatctaaccaagacggataagaaatatatacttcaattgataagacacggtagatcatagaacagaccaaatatattattaataatttgtatatacatagatataattatcacatattaaaaattcacacatttttgataaatgggaactgctgcaacaattcagactcccaccaaattaatgaataaagaaaatgcagaaatgattttggaaaaaattgttgatcatatagttatgtatattagtgacgaatcaagtgattcagaaaataatcctgaatatattgattttcgtaacagatacgaagactatagatctctcattataaaaagtgatcacgagtttgtaaagctatgtaaaaatcatgcagagaaaagttctccagaaacgcaacaaatgattatcaaacacatatacgaacaatatcttattccagtatctgaagtactattaaaacctataatgtccatgggtgacataattacatataacggatgtaaagacaatgaatggatgctagaacaactctctaccctaaactttaacaatctccgcacatggaactcatgtagcataggcaatgtaacgcgtctgttttatacattttttagttatctgatgaaagataaactaaatatataagtataatcccattctaatactttaacctgatgtattagcatcttattagaatattaacctaactaaaagacataacataaaaactcattacatagttgataaaaagcggtaggatataaatattatggctgccaccgttccgcgttttgacgacgtgtacaaaaatgcacaaagaagaattctagatcaagaaacattttttagtagaggtctaagtagaccgttaatgaaaaacacatatctatttgataattacgcgtatggatggataccagaaactgcaatttggagtagtagatacgcaaacttagatgcaagtgactattatcccatttcgttgggattacttaaaaagttcgagtttctcatgtctctatataaaggtcctattccagtatacgaagaaaaagtaaatactgaattcattgctaatggatcgttctctggtagatacgtatcatatcttcgaaagttttctgctcttccaacaaacgagtttattagttttttgttactgacttccattccaatctataatatcttgttctggtttaaaaatactcagtttgatattactaaacacacattattcagatacgtctatacagataatgccaaacacctggcgttggctaggtatatgcatcaaacaggagactataagcctttgtttagtcgtctcaaagagaattatatatttaccggtcccgttccaataggtatcaaagatataaatcaccctaatcttagtagagcaagaagtccatccgattatgagacattagctaatattagtactatattgtactttaccaagtatgatccggtattaatgtttttattgttttacgtacctgggtattcaattactacaaaaattactccagccgtagaatatctaatggataaactgaatctaacaaagagcgacgtacaactgttgtaaattattttatgcttcgtaaaatgtaggttttgaaccaaacattctttcaaagaatgagatgcataaaactttattatccaatagattgactatttcggacgtcaatcgtttaaagtaaacttcgtaaaatattctttgatcactgccgagtttaaaacttctatcgataattgtttcatatgttttaatatttacaagttttttggtccatggtacattagccggacaaatatatgcaaaataatatcgttctccaagttctatagtttctggattatttttattatattcagtaaccaaatacatattagggttatctgcggatttataatttgagtgatgcattcgactcaacataaataattctagaggagacgatctactatcaaattcggatcgtaaatctgtttctaaagaacggagaatatctatacatacctgattagaattcatccgtccttcagacaacatctcagacagtctggtcttgtatgtcttaatcatattcttatgaaacttggaaacatctcttctagtttcactagtacctttattaattctctcaggtacagattttgaattcgacgatgccgagtatttcatcgttgtatatttcttcttcgattgcataatcagattcttatataccgcctcaaactctattttaaaattattaaacaatactctattattaatcagtcgttctaactcctttgctatttctatggacttatctacatcttgactgtctatctctgtaaacacggagtcggtatctccatacacgctacgaaaacgaaatctgtaatctataggcaacgatgttttcacaatcggattaatatctctatcgtccatataaaatggattacttaatggattggcaaaccgtaacataccgttagataactctgctccatttagtaccgattctagatacaagatcattctacgtcctatggatgtgcaactcttagccgaagcgtatgagtatagagcactatttctaaatcccatcagaccatatactgagttggctactatcttgtacgtatattgcatggaatcatagatggccttttcagttgaactggtagcctgttttaacatctttttatatctggctctctctgccaaaaatgttcttaatagtctaggaatggttccttctatcgatctatcgaaaattgctatttcagagatgaggttcggtagtctaggttcacaatgaaccgtaatatatctaggaggtggatatttctgaagcaagagctgattatttatttcttcttccaatctattggtactaacaacgacaccgactaatgtttccggagatagatttccaaagatacacacattaggatacagactgttataatcaaagattaatacattattactaaacattttttgttttggagcaaataccttaccgccttcataaggaaacttttgttttgtttctgatctaactaagatagttttagtttccaacaatagctttaacagtggacccttgatgactgtactcgctctatattcgaataccatggattgaggaagcacatatgttgacgcacccgcgtctgtttttgtttctactccataatactcccacaaatactgacacaaacaagcatcatgaatacagtatctagccatatctaaagctatgtttagattataatccttatacatctgagctaaatcaacgtcatcctttccgaaagataatttatatgtatcattaggtaaagtaggacataatagtacgactttaaatccattttcccaaatatctttacgaattactttacatataatatcctcatcaacagtcacataattacctgtggttaaaacctttgcaaatgcagcggctttgcctttcgcgtccgtagtatcgtcaccgatgaacgtcatttctctaactcctctatttaatactttacccatgcaactgaacgcgttcttggatatagaatccaatttgtacgaatccaatttttcagatttttgaatgaatgaatatagatcgaaaaatatagttccattattgttattaacgtgaaacgtagtattggccatgccgcctactcccttatgactagactgatttctctcataaatacagagatgtacagcttcctttttgtccggagatctaaagataatcttctctcctgttaataactctagacgattagtaatatatctcagatcaaagttatgtccgttaaaggtaacgacatagtcgaacgttagttccaacaattgtttagctattcgtaacaaaactatttcagaacataaaactagttctcgttcgtaatccatttccattagtgactgtatcctcaaacatcctctatcgacggcttcttgtatttcctgttccgttaacatctcttcattaatgagcgtaaacaataatcgtttaccacttaaatcgatataacagtaacttgtatgcgagattgggttaataaatacagaaggaaacttcttatcgaagtgacactctatatctagaaataagtacgatcttgggatatcgaatctaggtatttttttagcgaaacagttacgtggatcgtcacaatgataacatccattgttaatctttgtcaaatattgctcgtccaacgagtaacatccgtctggagatatcccgttagaaatataaaaccaactaatattgagaaattcatccatggtggcattttgtatgctgcgtttctttggctcttctatcaaccacatatctgcgacggagcattttctatctttaatatctagattataacttattgtctcgtcaatgtctatagttctcatctttcccaacggcctcgcattaaatggaggaggagacaatgactgatatatttcgtccgtcactacgtaataaaagtaatgaggaaatcgtataaatacggtctcaccatttcgacatctggatttcagatataaaaatctgttttcaccgtgactttcaaaccaattaatgcaccgaacatccatttatagaatttagaaatatattttcatttaaatgaatcccaaacattggggaagagccgtatggaccattatttttatagtactttcgcaagcgggtttagacggcaacatagaagcgtgtaaacgaaaactatatactatagttagcactcttccatgtcctgcatgtagacggcacgcgactatcgctatagaggacaataatgtcatgtctagcgatgatctgaattatatttattattttttcatcagattatttaacaatttggcatctgatcccaaatacgcgatcgatgtgacaaaggttaaccctttataaacttaacccattataaaacttatgattagtcacgactgaaataaccgcgtgattattttttggtataattctacacggcatggtttctgtgactatgaattcaacccccgttacattagtgaaatctttaacaaacagcaagggttcgtcaaagacataaaactcattgtttacaatcgaaatagaccccctatcacacttaaaataaaaaatatccttatcctttaccaccaaataaaattctgattggtcaatgtgaatgtattcacttaacagttccacaaatttatttattaactccgaggcacatacatcgtcggtattttttatggcaaactttactcttccagcatccgtttctaaaaaaatattaacgagttccatttatatcatccaatattattgaaatgacgttgatggacaaatgatacaaataagaaggtacggtacctttgtccaccatctcctccaattcatgctctattttgtcattaactttaatgtatgaaaacagtacgccacatgcttccatgacagtgtgtaacactttggatacaaaatgtttgacattagtataattgttcaagactgtcaatctataatagatagtagctataatatattctatgatggtattgaagaagatgacaaccttggcatattgatcatttaacacagacatggtatcaacagatagcttgaatgaaagagaatcagtaattggaataagcgtcttctcgatggagtgtccgtataccaacatgtctgatattttgatgtattccattaaattatttagttttttctttttattctcgttaaacagcatttctgtcaacggaccccaacatcgttgaccgattaagttttgattgatttttccgtgtaaggcgtatctagtcagatcgtatagcctatccaataatccatcgtctgtgtgtagatcacatcgtacactttttaattctctatagaagagcgacagacatctggagcaattacagacagcaatttctttattctctacagatgtaagatacttgaagacattcctatgatgatgcagaattttggataacacggtattgatggtatctgttaccataattcctttgatggctgatagtgtcagagcacaagatttccaatctttgacaatttttagcaccattatctttgttttgatatctatatcagacagcatggtgcgtctgacaacacaaggattaagacggaaagatgaaatgattctctcaacatcttcaatggataccttgctattttttctggcattatctatatgtgcgagaatatcctctagagaatcagtatcctttttgatgatagtggatctcaatgacatgggacgtctaaaccttcttattctatcaccagattgcatggtgatttgtcttctttcttttatcataatgtaatctctaaattcatcggcaaattgtctatatctaaaatcataatatgagatgtttacctctacaaatatctgttcgtccaatgttagagtatttacatcagttttgtattccaaattaaacatggcaacggatttaattttatattcctctattaagtcctcgtcgataataacagaatgtagataatcatttaatccatcgtacatggttggaagatgctcgttgacaaaatctttaattgtcttgatgaaggtgggactatatctaacatcttgattaataaaatttataacattgtccataggatactttgtaactagttttatacacatctcttcatcggtaagtttagacagaatatcgtgaacaggtggtatattatattcatcagatatacgaagaacaatgtccaaatctatattgtttaatatattatatagatgtagtgtagctcctacaggaatatctttaactaagtcaatgatttcatcaaccgttagatctattttaaagttaatcatataggcattgatttttaaaaggtatgtagccttgactacattctcattaattaaccattccaagtcactgtgtgtaagaagattatattctatcataagcttgactacatttggtcccgataccattaaagaattcttatgatataaggaaacagattttaggtactcatctactctacaagaattttggagagccttaacgatatcagtgacgtttattatttcaggaggaaaaaacctaacattgagaatatcggaattaatagcttccagatacagtgattttggcaatagtccgtgtaatccataatccagtaacacgagctggtgcttgctagacaccttttcaatgtttaatttttttgaaataagctttgataaagccttcctcgcaaattccggatacatgaacatgtcggcgacatgattaagtattgttttttcattatttttatattttctcaacaagttctcaataccccaatagatgatagaatatcacccaatgcgtccatgttgtctatttccaacaggtcgctatatccaccaatagaagttttcccaaaaaagattctaggaacagttctaccaccagtaatttgttcaaaatagtcacgcaattcattttcgggtttaaattctttaatatcgacaatttcatacgctcctcttttgaaactaaacttatttagaatatccagtgcatttctacaaaaaggacatgtatacttgacaaaaattgtcactttgttattggccaacctttgttgtacaaattcctcggccattttaatatttaagtgatataaaactatctcgacttatttaactctttagtcgagatatatggacgcagatagctatatgatagccaactacagaaggcaaacgctataaaaaacataattacgacgagcatatttataaatatttttattcagcattacttgatatagtaatattaggcacagtcaaacattcaaccactctcgatacattaactctctcattttctttaacaaattctgcaatatcttcgtaaaaagattcttgaaactttttagaatatctatcgactctagatgaaatagcgttcgtcaacatactatgttttgtatacataaaggcgcccattttaacagtttctagtgacaaaatgctagcgatcctaggatcctttagaatcacatagattgacgattcgtctctcttagtaactctagtaaaataatcatacaatctagtacgcgaaataatattatccttgacttgaggagatctaaacaatctagttttgagaacatcgataagttcatcgggaatgacatacatactatctttaatagaactcttttcatccagttgaatggattcgtccttaaccaactgattaatgagatcttctattttatcattttccagatgatatgtatgtccattaaagttaaattgtgtagcgcttctttttagtctagcagccaatactttaacatcactaatatcgatatacaaaggagatgatttatctatggtattaagaattcgtttttcgacatctgtcaaaaccaattcctttttgcctgtatcatccagttttccatcctttgtaaagaaattattttctactagactattaataagactgataaggattcctccataattgcacaatccaaactttttcacaaaactagactttacaagatctacaggaatgcgtacttcaggtttcttagcttgtgattttttcttttgtggacattttcttgtgaccaactcatctaccatttcattgattttagcagtgaaataagctttcaatgcacgggcactgatactattgaaaacgagttgatcttcaaattccgccatttaagttcaccaaacaacttttaaatacaaatatatcaatagtagtagaataagaactataaaaaaaataataattaaccaataccaaccccaacaaccggtattattagttgatgtgactgttttctcatcacttagaacagatttaacaatttctataaagtctgtcaaatcatcttccggagaccccataaatacaccaaatatagcggcgtacaacttatccatttatacattgaatattggcttttctttatcgctatcttcatcatattcatcatcaatatcaacaagtcccagattacgagccagatcttcttctacattttcagtcattgatacacgttcactatctccagagagtccgataacgttagccaccacttctctatcaatgattagtttcttgagtgcgaatgtaatttttgtttccgttccggatctatagaaaactacaggtgtgataattgccttggccaattgtctttctcttttactgagtgattctagttcaccttctatagatctgagaatggatgattctccagtcgaaacatattctaccatggctccgtttaatttgttgatgaagatggattcatccttaaatgttttctctgtaatagtttccaccgaaagactatgcaaagaatttggaatgcgttccttgtgcttaatgtttccatagacggcttctagaagttgatacaacataggactagccgcggtaacttttatttttagaaagtatccatcgcttctatcttgtttagatttatttttataaagtttagtctctccttccaacataataaaagtggaagtcatttgactagataaactatcagtaagttttatagagatagacgaacaattagcgtattgagaagcatttagtgtaacgtattcgatacattttgcattagatttactaatcgattttgcatactctataacacccgcacaagtctgtagagaatcgctagatgcagtaggtcttggtgaagtttcaactctcttcttgattaccttactcatgattaaacctaaataattgtactttgtaatataatgatatatattttcactttatctcatttgagaataaaaatgtttttgtttaaccactgcatgatgtacagatttcggaatcacaaaccaccggtggttttattttatccttgtccaatgtgaattgaatgggagcggatgcgggtttcgtacgtagatagtacattcccgtttttagaccgagactccatccgtaaaaatgcatactcgttagtttggaataactcggatctgctatatggatattcatagattgactttgatcgatgaaggctcccctgtctgcagccatttttatgatcgtcttttgtggaatttcccaaatagttttataaactcgcttaatatcttctggaaggtttgtattctgaatggatccaccatctgccataatcctattcttgatctcatcattccataattttctctcggttaaaactctaaggagatgcggattaactacttgaaattctccagacaatactctccgagtgtaaatattactggtatacggttccaccgactcattatttcccaaaatttgagcagttgatgcagtcggcataggtgccaccaataaactatttctaagaccgtatgttctgattttatcttttagaggttcccaattccaaagatccgacggtacaacattccaaagatcatattgtagaataccgttactggcgtacgatcctacatatgtatcgtatggtccttccttctcagctagttcacaactcgcctctaatgcaccgtaataaatggtttcgaagatcttcttatttagatcttgtgcttccaggctatcaaatggataatttaagagaataaacgcgtccgctaatccttgaacaccaataccgataggtctatgtctcttattagagatttcagcttctggaataggataataattaatatctataattttattgagatttctgacaattactttgaccacatccttcagtttgagaaaatcaaatcgcccatctattacaaacatgttcaaggcaacagatgccagattacaaacggctacctcattagcatccgcatattgtattatctcagtgcaaagattactacacttgatagttcctaaattttgttgattactctttttgttacacgcatccttataaagaatgaatggagtaccagtttcaatctgagattctataatcgctttccagacgactcgagcctttattatagatttgtatctcctttctctttcgtatagtgtatacaatcgttcgaactcgtctccccaaacattgtccaatccaggacattcatccggacacatcaacgaccactctccgtcatccttcactcgtttcataaagagatcaggaatccaaagagctataaatagatctctggttctatgttcctcgtttcctgtattctttttaagatcgaggaacgccataatatcagaatgccacggttccaagtatatggccataactccaggccgtttgtttcctccctgatctatgtatctagcggtgttattataaactctcaacattggaataataccgtttgatataccattggtaccggagatatagcttccactggcacgaatattactaattgatagacctattccccctgccattttagagattaatgcgcatcgttttaacgtgtcatagataccctctatgctatcatcgatcatgttaagtagaaaacagctagacatttggtgacgactagttcccgcattaaataaggtaggagaagcgtgcgtaaaccatttttcagaaagtagattgtacgtctcaatagctgagtctatatcccattgatgaattcctactgcgacacgcattaacatgtgctgaggtctttcaacgatcttgttgtttattttcaacaagtaggatttttccaaagttttaaaaccaaaatagttgtatgaaaagtctcgttcgtaaataataaccgagttgagtttatccttatatttgttaactatatccatggtgatacttgaaataatcggagaatgtttcccatttttaggattaacatagttgaataaatcctccatcacttcactaaatagtttttttgtttccttgtgtagatttgatacggctattctggcggctagaatggcataatccggatgttgtgtagtacaagtggctgctatttcggctgccagagtgtccaattctaccgttgttactccattatatattccttgaataaccttcatagctattttaataggatctatatgatccgtgtttaagccataacataattttctaatacgagacgtgattttatcaaacatgacattttccttgtatccatttcgtttaatgacaaacatttttgttggtgtaataaaaaaattatttaacttttcattaatagggatttgacgtacgtagcgtacaaaatgattgttcctggtatatagataaagagtcctatatatttgaaaatcgttacggctcgattaaactttaatgattgcatagtgaatatatcattaggatttaactccttgactatcagggcggcaccagaaattaccatcaaaagcattaatacagttatgcctatcgcagttagaacggttatagcatccaccatttatatctaaaaattagatcaaagaatatgtgacaaagtcctagttgtatattgagaattgacaaaacaatgtttcttacatattttttttttattagtaaccgacttaatagtaggaactggaaaactagacttgattattctataagtatagatacccttccaaataatattctctttgataaaagttccagaaaatgtagaattttttaaaaagttatcttttgctattaccaagattgtgtttagacgcttattattaatatgagtgatgaaatccacaccgcctctagatatcgcctttatttccacattagatggtaaatccaatagtgaaactatctttttaggaatgtatggactcgcgtttagaggagtgaacgtcttgggcgtcggaaaggatgattcgtcaaacgaataaacaatttcacaaatggatgttaatgtattagtaggaaattttttgacgctagtggaattgaaaattctaatggatgatgttctacctatttcatccgataacatgttaatttccgacaccaacggttttaatatttcgatgatatacggtagtctctctttcggacttatatagcttattccacaatacgagtcattatatactccaaaaaacaaaataactagtataaaatctgtatcgaatgggaaaaacgaaattatcgacataggtatagaatccggaacattgaacgtattaatacttaattctttttctgtggtaagtaccgataggttattgacattgtatggttttaaatattctataacttgagacttgatagatattagtgatgaattgaaaattatttttatcaccacgtgtgtttcaggatcatcgtcgacgcccgtcaaccaaccgaacggagtaaaataaatatcattaatatatgctctagatattagtatttttatcaatcctttgattatcatcttctcgtaggcgaatgattccatgatcaagagtgatttaagaacatcctccggagtattaatgggcttagtaaacagtccatcgttgcaataataaaagttatccaagttaaaggatattatgcattcgtttaaagatatcacctcatctgacggagacaattttttggtaggttttagagactttgaagctacttgtttaacaaagttattcatcgtcgtttactattctatttaattttgtagttaatttatcacatatcacattaattgactttttggtccatttttccatacgtttatattcttttaatcctgcgttatccgtttccgttatatccagtgatagatcgtgcaggttaaatagaatgctcttaaataatgtcatttttttatccgctaaaaatttaaagaatgtataaacttttttcaaagatttaaaacttttaggtggtgtcctagtacacaatatcataaacaaactaataaacatcccgcattcagattccaacagctgattaacttccacattaatacagcctattttcgctccaaatgtacattcgaaaaatctgaataaaacatcaatgtcgcaatttgtattatccaatacagaatgtttgtgattcgtgttaaaaccatcggagaaggaatagaaataaaaattattatagtggtggaattcagttggaatattgcctccggagtcataaaaggatactaaacattgttttttatcataaattacacatttccaatgagacaaataacaaaatccaaacattacaaatctagaggtagaacttttaattttgtctttaagtatatacgataagatatgtttattcataaacgcgtcaaatttttcatgaatcgctaaggagtttaagaatctcatgtcaaattgtcctatataatccacttcggatccataagcaaactgagagactaagttcttaatacttcgattgctcatccaggctcctctctcaggctctattttcatcttgacgacctttggattttcaccagtatgtattcctttacgtgataaatcatcgattttcaaatccatttgtgagaagtctatcgccttagatactttttcccgtagtcgaggtttaaagaaatacgctaacggtatactagtaggtaactcaaaaacatcatatatagaatggtaacgcgtctttaactcgtcggttaactctttcttttgatcgagttcgtcgctactattgggtctgctcaggtgccccgactctactagttccaacatcataccgataggaatacaagacactttgccggcggttgtagatttatcatatttttccactacatatccgttacaatttgttaaaaatttagatacatctatattgctacataatccagctagtgaatatatatgacataataaattggtaaatcctagttctggtattttactaattactaaatctgtatatctttccatttatcatggaaaagaatttaccagatatcttcttttttccaaactgcgttaatgtattctcttacaaatattcacaagatgaattcagtaatatgagtaaaacggaacgtgatagtttctcattggccgtgtttccagttataaaacatagatggcataacgcacacgttgtaaaacataaaggaatatacaaagttagtacagaagcacgtggaaaaaaagtatctcctccatcactaggaaaacccgcacacataaacctaaccgcgaagcaatatatatacagtgaacacacaataagctttgaatgttatagttttctaaaatgtataacaaatacagaaatcaattcgttcgatgagtatatattaagaggactattagaagctggtaatagtttacagatattttccaattccgtaggtaaacgaacagatactataggtgtactagggaataagtatccatttagcaaaattccattggcctcattaactcctaaagcacaacgagagatattttcagcgtggatttctcatagacctgtagttttaactggaggaactggagtgggtaagacgtcacaggtacccaagttattgctttggtttaattatttatttggtggattctctactctagataaaatcactaactttcacgaaagaccagtcattctatctcttcctaggatagctttagttagattgcatagcaataccattttaaaatcattgggatttaaggtactagatggatctcctatttctttacggtacggatctataccggaagaattaataaacaaacaaccaaaaaaatatggaattgtattttctacccataagttatctctaacaaaactatttagttatggcactcttattatagacgaagttcatgagcatgatcaaataggagatattattatagcagtagcgagaaagcatcatacgaaaatagattctatgtttttaatgactgccacgttagaggatgaccgagaacggctaaaagtatttttacctaatcccgcatttatacatattcctggagatacactgtttaaaattagcgaggtatttattcataataagataaatccatcttccagaatggcatacatagaagaagaaaagagaaatttagttactgctatacagatgtatactcctcctgatggatcatccggtatagtctttgtggcatccgttgcacagtgtcacgaatataaatcatatttagaaaaaagattaccgtatgatatgtatattattcatggtaaggtcttagatatagacgaaatattagaaaaagtgtattcatcacctaatgtatcgataattatttctactccttatttggaatccagcgttactatacgcaatgttacacacatttatgatatgggtaaagtttttgtccccgctccttttggaggatcgcaagaatttatttctaaatctatgagagatcaacgaaaaggaagagtaggaagagttaatcctggtacatacgtctatttctatgatctgtcttatatgaagtctatacagcgaatagattcagaatttctacataattatatattgtacgctaataagtttaatctaacactccccgaagatttgtttataatccctacaaatttggatattctatggcgtacaaaggaatatatagactcgttcgatattagtacagaaacatggaataaattattatccaattattatatgaagatgatagagtatgctaaactttatgtactaagtcctattctcgctgaggagttggataactttgagaggacgggagaattaactagtattgtacgagaagccattttatctctaaatttacgaattaagattttaaattttaaacataaagatgatgatacgtatatacacttttgtaaaatattattcggtgtctataacggaacaaacgctactatatattatcatagacctctaacgggatatatgaatatgatttcagatactatatttgttcctgtagataataactaaaaatcaaactctaatgaccacatctttttttagagatgaaaaattttctacatctccttttgtagacacgactaaacattttgcaaaaaaaagtttattagtgtttagataatcgtatacttcatcagtgtagatagtaaatgtgaacaaataaaaggtattcttactcaatagattggtaaattccatagaatatattaatcctttcttcttgagatcccacatcatttcaaccagagacgttttatccaatgatttacctcgtactataccacatacaaaactagattttgcagtgacgtcgtacctggtattcctaccaaacaaaattttacttttagttcttttagaaaattctaaggtagaatctctatttgccaatatgtcatctatggaattaccactagcaaaaaatgatagaaatatatattgatacatcgcagctggttttgatctactatactttaaaaacgaatcagattccataattgcctgtatatcatcagctgaaaaactatgttttacacgtattccttcggcatttctttttaatgatatatcttgtttagacaatgataaagttatcatgtccatgagagacgcgtctccgtatcgtataaatatttcattagatgttagacgcttcattaggggtatacttctataaggtttcttaatcagtccatcattggttgcgtcaagaactactatcggatgttgttgggtatctctagtgttacacatggccttactaaagtttgggtaaataactatgatatctctattaattatagatgcatatatttcattcgtcaaggatattagtatcgacttgctatcgtcattaatacgtgtaatgtaatcatataaatcatgcgatagccaaggaaaattcaaatagatgttcatcatataatcgtcgctataattcatattaatacgttgacattgactaatttgtaatatagcctcgccacgaagaaagctctcgtattcagtttcatcgataaaggataccgttaaatataactggttgccgatagtctcatagtctattaagtggtaagtttcgtacaaatacagaatccctaaaatattatctaatgttggattaatctttaccataactgtataaaatggagacggagtcataactattttaccgtttgtacttactggaatagacgaaggaataatctccggacatgctggtaaagacccaaatgtctgtttgaagaaatccaatgttccaggtcctaatctcttaacaaaaattacgatattcgatcccgatatcctttgcattctatttaccagcatatcacgaactatattaagattatctatcatgtctattctcccaccgttatataaatcgcctccgctaagaaacgttagtatatccatacaatggaatacttcatttctaaaatagtattcgttttctaattctttaatgtgaaatcgtatactagaaagggaaaaattatctttgagttttccgttagaaaagaaccacgaaactaatgttctgattgcgtccgattccgttgctgaattaatggatttacaccaaaaactcatataacttctagatgtagaagcattcgctaaaaaattagtagaatcaaaggatataagtagatgttccaacaagtgagcaattcccaagatttcatctatatcattctcgaatccgaaattagaaattcccaagtagatatcctttttcatccgatcgttgatgaaaatacgaactttattcggtaagacaatcatttactaaggagtaaaataggaagtaatgttcgtatgtcgttatcatcgtataaattaaaggtgtgttttttaccattaagtgacattataattttaccaatattggaattataatataggtgtatttgcgcactcgcgacggttgatgcatcggtaaatatagctgtatctaatgttctagtcggtatttcatcatttcgctgtctaataatagcgttttctctatctgtttccattacagctgcctgaagtttattggtcggataatatgtaaaataataagaaatacatacgaataacaaaaataaaataagatataataaagatgccatttagagatctaattttgttcaacttgtccaaattcctacttacagaagatgaggaatcgttggagatagtgtcttccttatgtagaggatttgaaatatcttatgatgacttgataacttactttccagataggaaataccataaatatatttctaaagtatttgaacatgtagatttatcggaggaattaagtatggaattccatgatacaactttgcgagatttagtctatcttagattgtacaagtattccaagtgtatacggccgtgttataaattaggagataatctaaaaggcatagttgttataaaggacaggaatatttatattagggaagcaaatgatgacttgatagaatatctcctcaaggaatacactcctcagatttatacatattctaatgagcgcgtccccataactggttcaaaattaattctttgtggattttctcaagttacatttatggcgtatacaacgtcgcatataacaacaaataaaaaggtagatgttctcgtttccaaaaaatgtatagatgaactagtcgatccaataaattatcaaatacttcaaaatttatttgataaaggaagcggaacaataaacaaaatactcaggaagatattttattcggtaacaggtggccaaactccataggtagctttttctatttcggattttagaatttccaaattcaccagcgatttatctgttttggtgaaatccaaggatttattaatgtccacaaatgccatttgttttgtctgtggattgtatttgaaaatggaaacgatgtagttagatagatgcgctgcgaagtttcctattagggttccgcgcttcacgtcacccagcatacttgaatcaccatcctttaaaaaaaatgataagatatcaacatggagtatatcatactcggattttaattcttctactgcatcactgacattttcacaaatactacaatacggtttaccgaaaataatcagtacgttcttcatttatgggtatcaaaaacttaaaatcgttactgctggaaaataaatcactgacgatattagatgataatttatacaaagtatacaatggaatatttgtggatacaatgagtatttatatagccgtcgccaattgtgtcagaaacttagaagagttaactacggtattcataaaatacgtaaacggatgggtaaaaaagggagggcatgtaaccctttttatcgatagaggaagtataaaaattaaacaagacgttagagacaagagacgtaaatattctaaattaaccaaggacagaaaaatgctagaattagaaaagtgtacatccgaaatacaaaatgttaccggatttatggaagaagaaataaaggcagaaatgcaattaaaaatcgataaactcacatttcaaatatatttatctgattctgataacataaaaatatcattgaatgagatactaacacatttcaacaataatgagaatgttacattattttattgtgatgaacgagacgcagaattcgttatgtgtctcgaggctaaaacacatttctctaccacaggagaatggccgttgataataagtaccgatcaggatactatgctatttgcatctgctgataatcatcctaagatgataaaaaacttaactcaactgtttaaatatgttccatctgcagaggataactatttagcaaaattaacggcgttagtgaatggatgtgatttctttcctggactctatggggcatctataacacccaacaacttaaacaaaatacaattgtttagtgattttacaatcgataatatagtcactagtttggcaattaaaaattattatagaaagactaactctaccgtagacgtgcgtaatattgttacgtttataaacgattacgctaatttagacgatgtctactcgtatattcctccttgtcaatgcactgttcaagaatttatattttccgcattagatgaaaaatggaatgaatttaaatcatcttatttagaaagcgtgccgttaccctgccaattaatgtatgcgttagaaccacgcaaggagattgatgtttcagaagttaaaactttatcatcttatatagatttcgaaaatactaaatcagatatcgatgttataaaatctatatcctcgatcttcggatattctaacgaaaactgtaacacgatagtattcggcatctataaggataatttactactgagtataaatagttcattttactttaacgatagtctgttaataaccaatactaaaagtgataatataataaatataggttactagattaaaaatggtgttccaactcgtgtgctctacgtgcggcaaagatatttctcacgaacgatataaattgattatacgaaaaaaatcattaaaggatgtactcgtcagtgtaaagaacgaatgttgtaggttaaaattatctacacaaatagaacctcaacgtaacttaacagtgcaacctctattggatataaactaatatggatccggttaattttatcaagacatatgcgcctagaggttctattatttttattaattataccatgtcattaacaagtcatttgaatccatcgatagaaaaacatgtgggtatttattatggtacgttattatcggaacacttggtagttgaatcaacatatagaaaaggagttcgaatagtcccattggatagtttttttgaaggatatcttagtgcaaaagtatacatgttagagaatattcaagttatgaaaatagcagctgatacgtcattaactttattgggtattccgtatggatttggtcatgatagaatgtattgttttaaattggtagctgactgttataaaaatgccggtattgatacatcgtctaaacgaatattaggtaaagatatttttctgagccaaaacttcacagacgataatagatggataaagatatatgattctaataatttaacattttggcaaattgattaccttaaagggtgagttaatatgcataactactcctccgttgttttttccctcgttctttttcttaacgttgtttgccatcactctcataatgtaaagatattctaaaatggtaaacttttgcatatcggacgcagaaattggtataaatgttgtaattgtattatttcccgtcaatggactagtcacagctccatcagttttatatcctttagagtatttctcactcgtgtctaacattctagagcattccatgatctgtttatcgttgatattggccggaaagatagattttttattttttattatattactattggcaattgtagatataacttctggtaaatatttttctaccttttcaatctcttctattttcaagccggctatatattctgctatattgttgctagtatcaataccttttctggctaagaagtcatatgtggtattcactatatcagttttaactggtagttccattagcctttccacttctgcagaataatcagaaattggttctttaccagaaaatccagctactataataggctcaccgatgatcattggcaaaatcctatattgtaccagattaatgagagcatatttcatttccaataattctgctagttcttgagacattgatttatttgatgaatctagttggttctctagatactctaccatttctgccgcatacaataacttgttagataaaatcagggttatcaaagtgtttagcgtggctagaatagtgggcttgcatgtattaaagaatgcggtagtatgagtaaaccgttttaacgaattatatagtctccagaaatctgtggcgttacatacatgagccgaatgacatcgaagattgtccaatatttttaatagctgctctttgtccattatttctatatttgactcgcaacaattgtagataccattaatcaccgattcctttttcgatgccggacaatagcacaattgtttagctttggactctatgtattcagaattaatagatatatctcttaatacagattgcactatacattttgaaactatgtcaaaaattgtagaacgacgctgttctgcagccatttaactttaaataatttacaaaaatttaaaatgagcatccgtataaaaatcgataaactgcgccaaattgtggcatatttttcagagttcagtgaagaagtatctataaatgtagactcgacggatgagttaatgtatatttttgccgccttgggcggatctgtaaacatttgggccattatacctctcagtgcatcagtgttctaccgcggagccgaaaatattgtgtttaatcttcctgtgtccaaggtaaaatcgtgtttgtgtagttttcacaatgatgccatcatagatatagaacctgatctggaaaataatctagtaaaactttctagttatcatgtagtaagtgtcgattgtaataaggaactgatgcctattaggacagatactactatttgtctaagtatagatcaaaagaaatcttacgtgtttaattttcacaagtatgaagaaaaatgttgtggtagaaccgtcattcatttagaatggttgttgggctttatcaagtgtattagtcagcatcagcatttggctattatgtttaaagatgacaatattattatgaagactcctggtaatactgatgcattttccagggaatattctatgactgaatgttctcaagaactacaaaagttttctttcaaaatagctatctcgtctctcaacaaactacgaggattcaaaaagagagtcaatgtttttgaaactagaatcgtaatggataatgacgataacattttaggaatgttgttttcggatagagttcaatcctttaagatcaacatctttatggcgtttttagattaatactttcaatgagataaatatgggtggcggagtaagtgttgagctccctaaacgggatccgcctccgggagtacccactgatgagatgttattaaacgtggataaaatgcatgacgtgatagctcccgctaagcttttagaatatgtgcatataggaccactagcaaaagataaagaggataaagtaaagaaaagatatccagagtttagattagtcaacacaggacccggtggtctttcggcattgttaagacaatcgtataatggaaccgcacccaattgctgtcgcacttttaatcgtactcattattggaagaaggatggaaagatatcagataagtatgaagagggtgcagtattagaatcgtgttggccagacgttcacgacaccggaaaatgcgatgttgatttattcgactggtgtcagggggatacgttcgatagaaacatatgccatcagtggatcggttcagcctttaataggagtaatagaactgtagagggtcaacaatcgttaataaatctgtataataagatgcaaacattatgtagtaaagatgctagtgtaccaatatgtgaatcatttttgcatcatttacgcgcacacaatacagaagatagcaaagagatgatcgattatattctaagacaacagtctgcggactttaaacagaaatatatgagatgtagttatcccactagagataagttagaagagtcattaaaatatgcggaacctcgagaatgttgggatccagagtgttcgaatgccaatgttaatttcttgctaacacgtaattataataatttaggactttgcaatattgtacgatgtaatactagcgtgaacaacttacagatggataaaacttcctcattaagattgtcatgtggattaagcaatagtgatagattttctactgttcccgtcaatagagcaaaagtagttcaacataatattaaacactcgttcgacctaaaattgcatttgatcagtttattatctctcttggtaatatggatactaattgtagctatttaaatgggtgccgcggcaagcatacagacgacggtgaatacactcagcgaacgtatctcgtctaaattagaacaagaagcgaatgctagtgctcaaacaaaatgtgatatagaaatcggaaatttttatatccgacaaaaccatggatgtaacctcactgttaaaaatatgtgctctgcggacgcggatgctcagttggatgctgtgttatcagccgctacagaaacatatagtggattaacaccggaacaaaaagcatacgtgccagctatgtttactgctgcgttaaacattcagacgagtgtaaacactgttgttagagattttgaaaattatgtgaaacagacttgtaattctagcgcggtcgtcgataacaaattaaagatacaaaacgtaatcatagatgaatgttacggagccccaggatctccaacaaatttggaatttattaatacaggatctagcaaaggaaattgtgccattaaggcgttgatgcaattgacgactaaggccactactcaaatagcacctaaacaagttgctggtacaggagttcagttttatatgattgttatcggtgttataatattggcagcgttgtttatgtactatgccaagcgtatgttgttcacatccaccaatgataaaatcaaacttattttagccaataaggaaaacgtccattggactacttacatggacacattctttagaacttctccgatggttattgctaccacggatatgcaaaactgaaaatatattgataatattttaatagattaacatggaagttatcactgatcgtctagacgatatagtgaaacaaaatatagcggatgaaaaatttgtagattttgttatacacggtctagagcatcaatgtcctgctatacttcgaccattaattaggttgtttattgatatactattatttgttatagtaatttatatttttacggtacgtctagtaagtagaaattatcaaatgttgttggcgttggtggcgctagtcatcacattaactattttttattactttatactataatagtactagactgacttctaacaaacatctcacctgccataaataaatgcttgatattaaagtcttctatttctaacactattccatctgtggaaaataatactctgacattatcgctaattgacacatcggtgagtgatatgcctataaagtaataatcttctttgggcacatataccagtgtaccaggttctaacaacctatttactggtgctcctatagcatactttttctttaccttgagaatatccatcgtttgcttggtcaatagcgatatgtgattttttatcaaccactcgaaaaagtaattggagtgttcatatcctctacgggctattgtctcatggccgtgtatgaaatttaagtaacacgactgtggtagatttgttctatagagccggttgccgcaaatagatagaactaccaatatgtctgtacaaatgttaaacattaattgattaacagaaaaaacaatgttcgttctgggaatagaaaccagatcaaaacaaaattcgttagaatatatgccacgtttatacattgaatataaaataactacagtttgaaaaataacagtatcatttaaacatttaacttgcggggttaatctcacaactttactgtttttgaactgttcaaaatatagcatagatccgtgagaaatacgtttagccgcctttaatagaggaaatcccaccgcctttctggatctcaccaacgacgatagttctgaccagcaactcatttcttcatcatccacctgttttaacatataataggcaggagatagatatccgtcattgcaatattccttctcgtaggcacacaatctaatattgataaaatctccattctcttctctgcatttattatcttgtttcggtggctgattaggctgtagtcttggtttaggctttggtatatcgttgttgaatctattttggtcattaaatctttcatttcttcctggtatatttttatcacctcgtttggttggatttttgtctatattatcgtttgtaacatcggtacgggtattcatttatcacaaaaaaaacttctctaaatgagtctactgctagaaaacctcatcgaagaagataccatattttttgcaggaagtatatctgagtatgatgatttacaaatggttattgccggcgcaaaatccaaatttccaagatctatgctttctatttttaatatagtacctagaacgatgtcaaaatatgagttggagttgattcataacgaaaatatcacaggagcaatgtttaccacaatgtataatataagaaacaatttgggtctaggagatgataaactaactattgaagccattgaaaactatttcttggatcctaacaatgaagttatgcctcttattattaataatacggatatgactgccgtcattcctaaaaaaagtggtaggagaaagaataagaacatggttatcttccgtcaaggatcatcacctatcttgtgtattttcgaaactcgtaaaaagattaatatttataaagaaaatatggaatccgcgtcgactgagtatacacctatcggagacaacaaggctttgatatctaaatatgcgggaattaatatcctaaatgtgtattctccttccacatccataagattgaatgccatttacggattcaccaataaaaataaactagagaaacttagtactaataaggaactagaatcgtatagttctagccctcttcaagaacccattaggttaaatgattttctgggactattggaatgtgttaaaaagaatattcctctaacagatattccgacaaaggattgattactataaatggagaatgttcctaatgtatactttaatcctgtgtttatagagcccacgtttaaacattctttattaagtgtttataaacacagattaatagttttatttgaagtattcgttgtattcattctaatatatgtattttttagatctgaattaaatatgttcttcatgcctaaacgaaaaatacccgatcctattgatagattacgacgtgctaatctagcgtgtgaagacgataaattaatgatctatggattaccatggatgacaactcaaacatctgcgttatcaataaatagtaaaccgatagtgtataaagattgtgcaaagcttttgcgatcaataaatggatcacaaccagtatctcttaacgatgttcttcgcagatgatgattcattttttaagtatttggctagtcaagatgatgaatcttcattatctgatatattgcaaatcactcaatatctagactttctgttattattattgatccaatcaaaaaataaattagaagccgtgggtcattgttatgaatctctttcagaggaatacagacaattgacaaaattcacagactttcaagattttaaaaaactgtttaacaaggtccctattgttacagatggaagggtcaaacttaataaaggatatttgttcgactttgtgattagtttgatgcgattcaaaaaagaatcctctctagctaccaccgcaatagatcctgttagatacatagatcctcgtcgcaatatcgcattttctaacgtgatggatatattaaagtcgaataaagtgaacaataattaattctttattgtcatcatgaacggcggacatattcagttgataatcggccccatgttttcaggtaaaagtacagaattaattagacgagttagacgttatcaaatagctcaatataaatgcgtgactataaaatattctaacgataatagatacggaacgggactatggacgcatgataagaataattttgaagcattggaagcaactaaactatgtgatgtcttggaatcaattacagatttctccgtgataggtatcgatgaaggacagttctttccagacattgttgaattctgtgagcgtatggcaaacgaaggaaaaatagttatagtagccgcactcgatgggacatttcaacgtaaaccgtttaataatattttgaatcttattccattatctgaaatggtggtaaaactaactgctgtgtgtatgaaatgctttaaggaggcttccttttctaaacgattgggtgaggaaaccgagatagaaataataggaggtaatgatatgtatcaatcggtgtgtagaaagtgttacatcgactcataatattatattttttatctaaaaaactaaaaataaacattgattaaattttaatataatacttaaaaatggatgttgtgtcgttagataaaccgtttatgtattttgaggaaattgataatgagttagattacgaaccagaaagtgcaaatgaggtcgcaaaaaaactgccgtatcaaggacagttaaaactattactaggagaattattttttcttagtaagttacagcgacacggtatattagatggtgccaccgtagtgtatataggatctgctcccggtacacatatacgttatttgagagatcatttctataatttaggagtgatcatcaaatggatgctaattgacggccgccatcatgatcctattttaaatggattgcgtgatgtgactctagtgactcggttcgttgatgaggaatatctacgatccatcaaaaaacaactgcatccttctaagattattttaatttctgatgtgagatccaaacgaggaggaaatgaacctagtacggcggatttactaagtaattacgctctacaaaatgtcatgattagtattttaaaccccgtggcgtctagtcttaaatggagatgcccgtttccagatcaatggatcaaggacttttatatcccacacggtaataaaatgttacaaccttttgctccttcatattcagctgaaatgagattattaagtatttataccggtgagaacatgagactgactcgagttaccaaatcagacgctgtaaattatgaaaaaaagatgtactaccttaataagatcgtccgtaacaaagtagttgttaactttgattatcctaatcaggaatatgactattttcacatgtactttatgctgaggaccgtgtactgcaataaaacatttcctactactaaagcaaaggtactatttctacaacaatctatatttcgtttcttaaatattccaacaacatcaactgaaaaagttagtcatgaaccaatacaacgtaaaatatctagcaaaaattctatgtctaaaaacagaaatagcaagagatccgtacgcagtaataaatagaaacgtactactgagatatactaccgatatagagtataatgatttagttactttaataaccgttagacataaaattgattctatgaaaactgtgtttcaggtatttaacgaatcatccataaattatactccggttgatgatgattatggagaaccaatcattataacatcgtatcttcaaaaaggtcataacaagtttcctgtaaattttctatacatagatgtggtaatatctgacttatttcctagctttgttagactagatactacagaaactaatatagttaatagtgtactacaaacaggcgatggtaaaaagactcttcgtcttcccaaaatgttagagacggaaatagttgtcaagattctctatcgccctaatataccattaaaaattgttagatttttccgcaataacatggtaactggagtagagatagccgatagatctgttatttcagtcgctgattaatcaattagtagagatgagataagaacattataataatcaataatatatcttatatctcgtttagaaaaatgctaatattaaaatagctaacgctagtaatccaatcggaagccatttgatatctataatagggtatctaatttcctgattcagatagcggacagctatattctcggtagctactcgtttggaatcacaaacattatttacatctaatttactatctgtaatggaaacgtttcccaatgaaatggtacaatccgatacattgcattttgttatatttttttttaaagaggctggtaacaacgcatcgcttcgtttacatggctcgtaccaacaataatagggtaatcttgtatctattcctatccgtactatgcttttatcaggataaatacatttacatcgtatatcgtctttgttagcatcacagaatgcataaatttgttcgtccgtcatgataaaaatttaaagtgtaaatataactattatttttatagttgtaataaaaagggaaatttgattgtataccttcggttctttaaaagaaactgacttgataaaaatggctgtaatctctaaggttacgtatagtctatatgatcaaaaagagattaatgctacagatattatcattagtcatgttaaaaatgacgacgatatcggtaccgttaaagatggtagactaggtgctatggatggggcattatgtaagacttgtgggaaaacggaattggaatgtttcggtcactggggtaaagtaagtatttataaaactcatatagttaagcctgaatttatttcagaaattattcgtttactgaatcatatatgtattcactgcggattattgcgttcacgagaaccgtattccgacgatattaacctaaaagagttatcgggacacgctcttaggagattaaaggataaaatattatccaagaaaaagtcatgttggaacagtgaatgtatgcaaccgtatcaaaaaattactttttcaaagaaaaaggtttgtttcgtcaacaagttggatgatattaacgttcctaattctctcatctatcaaaagttaatttctattcatgaaaagttttggccattattagaaattcatcaatatccagctaacttattttatacagactactttcccatccctccgttgattattagaccggctattagtttttggatagatagtatacccaaagaaaccaatgaattaacttacttattaggtatgatcgttaagaattgtaacttgaatgctgatgaacaggttatccagaaggcggtaatagaatacgatgatattaaaattatttctaataacacttccagtatcaatttatcatatattacatccggcaaaaataatatgattagaagttatatcgtcgcccgacgaaaagatcagacggctagatctgtaattggtcccagtacatctatcaccgttaatgaggtaggaatgcccgcatatattagaaatacacttacagaaaagatatttgttaatgcctttacagtggataaagttaaacaactattagcatcaaaccaagttaaattttactttaataaacgattaaaccaattaacaagaatacgccaaggaaagtttatcaaaaataaaatacatttattgcctggtgattgggtagaagtagctgttcaagaatatacaagtattatttttggaagacagccgtctctacatagatacaacgtcatcgcttcatctatcagagctaccgaaggagatactatcaaaatatctcccggaattgccaactctcaaaatgctgatttcgacggagatgaagaatggatgatattagaacaaaatcctaaagctgtaattgaacaaagtattcttatgtatccgacgacgttactcaaacacgatattcatggagcccccgtttatggatctattcaagatgaaatcgtagcagcgtattcattgtttaggatacaagatctttgtttagatgaagtattgaacatcttggggaaatatggaagagagttcgatcctaaaggtaaatgtaaattcagcggtaaagatatctatacttacttgataggtgaaaagattaattatccgggtctcttaaaggatggtgaaattattgcaaacgacgtagatagtaattttgttgtggctatgaggcatctgtcattggctggactcttatccgatcataagtcgaacgtggaaggtatcaactttattatcaagtcatcttatgtttttaagagatatctatctatttacggttttggggtgacattcaaagatctgagaccaaattcgacgttcactaataaattggaggccatcaacgtagaaaaaatagaacttatcaaagaagcatacgccaaatatctcaacgatgtaagagacgggaaaatagttccattatctaaagctttagaggcggactatgtggaatccatgttatccaacttgacaaatcttaatatccgagagatagaagaacatatgagacaaacgctgatagatgatccagataataacctcctgaaaatggccaaagcgggttataaagtaaatcctacagaactaatgtatattctaggtacgtatggacaacaaaggattgatggtgaaccagcagagactcgagtattgggtagagtcttaccttactatcttccagactctaaggatccagaaggaagaggttacattcttaattctttaacaaaaggattaacaggttctcaatattacttttcgatgctggttgcaagatctcaatctactgatatcgtctgtgaaacatcacgtaccggaacactggctagaaaaatcattaaaaagatggaggatatggtggtcgacggatacggacaagtagttataggtaatacgctcatcaagtacgccgccaattataccaaaattctaggctcagtatgtaaacctgtagatcttatctatccagatgagtccatgacttggtatttggaaattagtgctctgtggaataaaataaaacagggattcgtttactctcagaaacagaaacttgcaaagaagacattggcgccgtttaatttcctagtattcgtcaaacccaccactgaggataatgctattaaggttaaggatctgtacgatatgattcataacgtcattgatgatgtgagagagaaatacttctttacggtatctaatatagattttatggagtatatattcttgacgcatcttaatccttctagaattagaattacaaaagaaacggctatcactatctttgaaaagttctatgaaaaactcaattatactctaggtggtggaactcctattggaattatttctgcacaggtattgtctgagaagtttacacaacaagccctgtccagttttcacactactgaaaaaagtggtgccgtcaaacaaaaacttggtttcaacgagtttaataacttgactaatttgagtaagaataagaccgaaattatcactctggtatccgatgatatctctaaacttcaatctgttaagattaatttcgaatttgtatgtttgggagaattaaatccagacatcactcttcgaaaagaaacagataggtatgtagtagatataatagtcaatagattatacatcaagagagcagaaattaccgaattagtcgtcgaatatatgattgaacgattcatctcctttagcgtcattgtaaaggaatggggtatggaaacattcattgaggacgaggataatattagatttactgtctatctaaatttcgttgaaccagaggaattgaatcttagtaagtttatgatggttcttccgggggcagccaacaagggaaagattagtaaattcaagattcctatctctgattatacgggttatgacgacttcaatcaaacaaaaaagctcaataagatgactgtagaactcatgaatctaaaagaattaggttctttcgatttggaaaacgtcaacgtgtatcctggagtatggaatacatacgatatcttcggtatcgaggccgctcgtgaatacttgtgcgaagccatgttaaacacctatggagaagggttcgattatctgtatcagccttgtgatcttctcgctagtttactatgtgctagttacgaaccagaatcagtgaataaattcaagttcggcgcagctagtactcttaagagagctacgttcggagacaataaagcattgttaaacgcggctcttcataaaaagtcagaacctattaacgataatagtagctgccacttttttagcaaggtccctaatataggaactggatattacaaatactttatcgacttgggtcttctcatgagaatggaaaggaaactatctgataagatatcttctcaaaagatcaaggaaatggaagaaacagaagacttttaattcttatcaataacatatttttctatgatctgtcttttaaacgatggattttccacaaatgcgcctctcaagtccctcatagaatgatacacgtataaaaaatatagcataggcaatgactccttatttttagacattagatatgccaaaatcatagccccgcttctatttactcccgcagcacaatgaaccaacacgggctcgtttcgttgatcacatttagataaaaaggcggttacgtcgtcaaaatatttactaatatcggtagttgtatcatctaccaacggtatatgaataatattaatattagagttaggtaatgtatatttatccatcgtcaaatttaaaacatatttgaacttaacttcagatgatggtgcatccatagcatttttataatttcccaaatacacattattggttacccttgtcattatagtgggagatttggctctgtgcatatctccagttgaacgtagtagtaagtatttatacaaacttttcttatccatttataacgtacaaatggataaaactactttatcggtaaacgcgtgtaatttagaatacgttagagaaaaggctatagtaggcgtacaagcagccaaaacatcaacacttatattctttgttattatattggcaattagtgcgctattactctggtttcagacgtctgataatccagtctttaatgaattaacgagatatatgcgaattaaaaatacggttaacgattggaaatcattaacggatagcaaaacaaaattagaaagtgatagaggtagacttctagccgctggtaaggatgatatattcgaattcaaatgtgtggatttcggcgcctattttatagctatgcgattggataagaaaacatatctgccgcaagctattaggcgaggtactggagacgcgtggatggttaaaaaggcggcaaaggtcgatccatctgctcaacaattttgtcagtatttgataaaacacaagtctaataatgttattacttgtggtaatgagatgttaaatgaattaggttatagcggttattttatgtcaccgcattggtgttccgattttagtaatatggaatagtgttagataaatgcggtaacgaatgttcctgtaaggaaccataacagtttagatttaacgttaaagatgagcataaacataataaacaaaattacaatcaaacctataacattaatatcaaacaatccaaaaaatgaaatcagtggagtagtaaacgcgtacataactcctggataacgtttagtagctgccgttcctattctagaccaaaaattcggtttcatgttttcgaaacggtgttctgcaacaagtcggggatcgtgttctacatatttggcggcattatccagtatctgcctattgatcttcatttcgttttcaattctggctatttcaaaataaaatcccgatgatagacctccagactttataatttcatctacgatgttcagcgccgtagtaactctaataatataggctgataagctaacatcataccctcctgtatatgtgaatatggcatgatttttgtccattacaagctcggttttaactttattgcctgtaataatttctctcatctgtaggatatctatttttttgtcatgcattgccttcaagacgggacgaagaaacgtaatatcctcaataacgttatcgttttctacaataactacatattctacctttttattttctaactcggtaaaaaaattagaatcccatagggctaaatgtctagcgatatttcttttcgtttcctctgtacacatagtgttacaaaaccctgaaaagaagtgagtatacttgtcatcatttctaatgtttcctccagtccactgtataaacgcataatccttgtaatgatctggatcatccttgactaccacaacatttcttttttctggcataacttcgttgtcctttacatcatcgaacttctgatcattaatatgctcatgaacattaggaaatgtttctgatggaagtctatcaataactggcacaacaataacaggagttttcgccgccgccatttagttattgaaattaatcatatacaactctttaatacgagttatattttcgtctatccattgtttcacatttacatatttcgacaaaaagatataaaatgcgtattccaatgcttctctgtttaatgaattactaaaatatacaaacacgtcactgtctggcaataaatgatatcttagaatattgtaacaatttattttgtattgcacatgttcgtgatctatgagttcttcttcgaatggcataggatctccgaatctgaaaacgtataaataggagttagaataataatatttgagagtattggtaatatataaactctttagcggtataattagtttttttctctcaatttctatttttagatgtgatggaaaaatgactaattttgtagcattagtatcatgaactctaatcaaaatcttaatatcttcgtcacacgttagctctttgaagtttttaagagatgcatcagttggttcgaccgatggagtaggtgcaacaattttttgttcgatgtatgtatgtactggagccattgttttaactataatggtgcttgtatcgaaaaactttaatgcagatagcggaagctcttcgccgcgactttctacatcgtaattgggttctaacgccgatctctgaatggatactagttttctaagttctaatgtgattctctgaaaatgtaaatccaattcctccggcattatagatgtgtatacatcggtaaataaaactatagtatccaacgatcccttctcgcaaattctagtcttaaccaaaaaatcgtatataaccacggagatggcgtatttaagagtggattcttctaccgttttgttcttggatgtcatataggaaactataaagtccgcactactgttaagaatgattactaacgcaactatatagttcaaattaagcattttggaaacataaaataactctgtagacgatacttgactttcgaataagtttgcagacaaacgaagaaagaacagacctctcttaatttcagaagaaaactttttttcgtattcctgacgtctagagtttatatcaataagaaagttaagaattagtcggttaatgttgtatttcattacccaagtttgagatttcataatattatcaaaagacatgataatattaaagataaagcgctgactatgaacgaaatagctatatggttcgctcaaaaatatagtcttgttaaacgtggaaacgataactgtatttttaatcacgtcagcggcatctaaattaaatataggtatatttattccacacactctacaatatgccacaccatcttcataataaataaattcgttagcaaaattattaattttagtgaaatagttagcgtcaactttcatagcttccttcaatctaatttgatgctcacacggtgcgaattccactctaacatcccttttccatgcctcaggttcatcgatctctataatatctagttttttgcgtttcacaaacacaggctcgtctctcgcgatgagatctgtatagtaactatgtaaatgataactagatagaaagatgtagctatatagatgacgatcctttaagagaggtataataactttaccccaatcagatagactgttgttatggtcttcggaaaaagaatttttataaatttttccagtattttccaaatatacgtacttaacatctaaaaaatccttaatgataataggaatggataatccgtctattttataaagaaatacatatcgcacattatacttttttttggaaatgggaataccgatgtgtctacataaatatgcaaagtctaaatattttttagagaatcttaattggtccaaattcttttccaagtacggtaatagatttttcatattgaacggtatcttcttaatctctggttctagttccgcattaaatgatgaaactaagtcactatttttataactaacgattacatcacctctaacatcatcatttaccagaatactgatcttcttttgtcgtaaatacatgtctaatgtgttaaaaaaaagatcatacaagttatacgtcatttcatctgtggtattcttgtcattgaaggataaactcgtactaatctcttctttaacagcctgttcaaatttatatcctatatacgaaaaaatagcaaccagtgtttgatcatccgcgtcaatattctgttctatcgtagtgtataacaatcgtatatcttcttctgtgatagtcgatacgttataaaggttgataacgaaaatatttttatttcgtgaaataaagtcatcgtaggattttggacttatattcgcgtctagtagatatgcttttatttttggaatgatctcaattagaatagtctctttagagtccatttaaagttacaaacaactaggaaattggtttatgatgtataatttttttagtttttatagattctttattctatacttaaaaaatgaaaataaatacaaaggttcttgagggttgtgttaaattgaaagcgagaaataatcataaattatttcattatcgcgatatccgttaagtttgtatcgtaatggcgtggtcaattacaaataaagcggatactagtagcttcacaaagatggctgaaatcagagctcatctaaaaaatagcgctgaaaataaagataaaaacgaggatattttcccggaagatgtaataattccatctactaagcccaaaaccaaacgagccactactcctcgtaaaccagcggctactaaaagatcaaccaaaaaggaggaagtggaagaagaagtagttatagaggaatatcatcaaacaactgaaaaaaattctccatctcctggagtcagcgacattgtagaaagcgtggccgctgtagagctcgatgatagcgacggggatgatgaacctatggtacaagttgaagctggtaaagtaaatcatagtgctagaagcgatctctctgacctaaaggtggctaccgacaatatcgttaaagatcttaagaaaattattactagaatctctgcagtatcgacggttctagaggatgttcaagcagctggtatctctagacaatttacttctatgactaaagctattacaacactatctgatctagtcaccgagggaaaatctaaagttgttcgtaaaaaagttaaaacttgtaagaagtaaatgcgtgcacttttttataaagatggtaaactctttaccgataataattttttaaatcctgtatcagacgataatccagcgtatgaggttttgcaacatgttaaaattcctactcatttaacagatgtagtagtatatgaacaaacgtgggaggaggcgttaactagattaatttttgtgggaagtgattcaaaaggacgtagacaatacttttacggaaaaatgcatgtacagaatcgcaacgctaaaagagatcgtatttttgttagagtatataacgttatgaaacgaattaattgttttataaacaaaaatataaagaaatcgtccacagattccaattatcagttggcggtttttatgttaatggaaactatgttttttattagatttggtaaaatgaaatatcttaaggagaatgaaacagtagggttattaacactaaaaaataaacacatagaaataagtcccgatgaaatagttatcaagtttgtaggaaaggacaaagtttcacatgaatttgttgttcataagtctaatagactatataagccgctattgaaactgacggatgattctagtcccgaagaatttctgttcaacaaactaagtgaacgaaaggtatatgaatgtatcaaacagtttggtattagaatcaaggatctccgaacgtatggagtcaattatacgtttttatataatttttggacaaatgtaaagtccatatctcctcttccatcaccaaaaaagttaatagcgttaactatcaaacaaactgctgaagtggtaggtcatactccatcaatttcaaaaagagcttatatggcaacgactattttagaaatggtaaaggataaaaattttttagatgtagtatctaaaactacgttcgatgaattcctatctatagtcgtagatcacgttaaatcatctacggatggatgatatagatctttacacaaataattacaaaaccgataaatggaaatggataagcgtatgaaatctctcgcaatgaccgctttctttggggagctaagcacattagatattatggcattgataatgtctatatttaaacgccatccaaacaataccattttttcagtggataaggatggtcagtttatgattgatttcgaatacgataattataaggcttctcaatatttggatctgaccctcactccgatatctggagatgaatgcaagactcacgcatcgagtatagccgaacaattggcgtgtgtggatattattaaagaggatattagcgaatatatcaaaactactccccgtcttaaacgatttataaaaaaataccgcaatagatcagatactcgcatcagtcgagatacagaaaagcttaaaatagctctagctaaaggcatagattacgaatatataaaagacgcttgttaataagtaaatgaaaaaaaactagtcgtttataataaaacacgatatggatgccaacgtagtatcatcttctactattgcgacgtatatagacgctttagcgaagaatgcttcggaattagaacagaggtctaccgcatacgaaataaataatgaattggaactagtatttattaagccgccattgattactttgacaaatgtagtgaatatctctacgattcaggaatcgtttattcgatttaccgttactaataaggaaggtgttaaaattagaactaagattccattatctaaggtacatggtctagatgtaaaaaatgtacagttagtagatgctatagataacatagtttgggaaaagaaatcattagtgacggaaaatcgtcttcacaaagaatgcttgttgagactatcgacagaggaacgtcatatatttttggattacaagaaatatggatcctctatccgactagaattagtcaatcttattcaagcaaaaacaaaaaactttacgatagactttaagctaaaatattttctaggatccggtgcccagtctaaaagttctttattacacgctattaatcatccaaagtcaaggcctaatacatctctggaaatagaatttacacctagagacaatgaaacagttccatatgatgaactaataaaggaattgacgactctctcgcgtcatatatttatggcttctccagagaatgtaattctttctccgcctattaacgcgcctataaaaacctttatgttgcctaaacaagatatagtaggtttggatctggaaaatctatatgccgtaactaagactgacggcattcctataactatcagagttacatcaaacgggttgtattgttattttacacatcttggttatattattagatatcctgttaagagaataatagattccgaagtagtagtctttggtgaggcagttaaggataagaactggaccgtatatctcattaagctaatagagcctgtgaatgcaatcaatgatagactagaagaaagtaagtatgttgaatctaaactagtggatatttgtgatcggatagtattcaagtcaaagaaatacgaaggtccgtttactacaactagtgaagtcgtcgatatgttatctacatatttaccaaagcaaccagaaggtgttattctgttctattcaaagggacctaaatctaacattgattttaaaattaaaaaggaaaatactatagaccaaactgcaaatgtagtatttaggtacatgtccagtgaaccaattatctttggagagtcgtctatctttgtagagtataagaaatttagcaacgataaaggctttcctaaagaatatggttctggtaagattgtgttatataacggcgttaattatctaaataatatctattgtttggaatatattaatacacataatgaagtgggtattaagtccgtggttgtacctattaagtttatagcagaattcttagttaatggagaaatacttaaacctagaattgataaaaccatgaaatatattaactcagaagattattatggaaatcaacataatatcatagtcgaacatttaagagatcaaagcatcaaaataggagatatctttaacgaggataaactatcggatgtgggacatcaatacgccaataatgataaatttagattaaatccagaagttagttattttacgaataaacgaactagaggaccgttgggaattttatcaaactacgtcaagactcttcttatttctatgtattgttccaaaacatttttagacgattccaacaaacgaaaggtattggcgattgattttggaaacggtgctgacctggaaaaatacttttatggagagattgcgttattggtagcgacggatccggatgctgatgctatagctagaggaaatgaaagatacaacaaattaaactctggaattaaaaccaagtactacaaatttgactacattcaggaaactattcgatccgatacatttgtctctagtgtcagagaagtattctattttggaaagtttaatatcatcgactggcagtttgctatccattattcttttcatccgagacattatgctaccgtcatgaataacttatccgaactaactgcttctggaggcaaggtattaatcactaccatggacggagacaaattatcaaaattaacagataaaaagacttttataattcataagaatttacctagtagcgaaaactatatgtctgtagaaaaaatagctgatgatagaatagtggtatataatccatcaacaatgtctactccaatgactgaatacattatcaaaaagaacgatatagtcagagtgtttaacgaatacggatttgttcttgtagataacgttgatttcgctacaattatagaacgaagtaaaaagtttattaatggcgcatctacaatggaagatagaccatctacaagaaactttttcgaactaaatagaggagccattaaatgtgaaggtttagatgtcgaagacttacttagttactatgttgtttatgtcttttctaagcggtaaataataatatggtatgggttctgatctcccagttctaaatgcattaaataattccaatagagcgatttttgttcctataggaccttccaactgtggatactctgtattgttaatagatatattaatacttttgtcgggtaacagaggttctacgtcttttaaaaataaaagtttgataacatctggcctgttcataaataaaaacttggcgattctatatatactcttattatcaaatctagccattgtcttatagatgtgagctactgtaggtgtaccatttgattttctttctaatactatatatttctctcgaagaagttcttgcacatcatctgggaataaaatactactgttgagtaaatcagttattttttttatatcgatattgatggacatttttatagttaaggataataagtatcccaaagtagataacgacgataacgaagtatttatacttttaggaaatcacaatgactttatcagattaaaattaacaaaattaaaggagcatgtatttttttctgaatatattgtgactccagatacatatggatctttatgcgtcgaattaaatgggtctagttttcagcacggcggtagatatatagaggtggaggaatttatagatgctggaagacaagttagatggtgttctacatccaatcatatatctaaagatatacccgaagatatgcacactgataaatttgtcatttatgatatatacacttttgacgctttcaagaataaacgattggtattcgtacaggtacctccgtcgttaggagatgatagtcatttgactaatccgttattgtctccgtattatcgtaattcagtagccagacaaatggtcaatgatatgatttttaatcaagattcatttttaaaatatttattagaacatctgattagaagccactatagagtttctaaacatataacaatagttagatacaaggataccgaagaattaaatctaacgagaatatgttataatagagataagtttaaggcgtttgtattcgcttggtttaacggcgtttcggaaaatgaaaaggtactagatacgtataaaaaggtatctaatttgatataatgaattcagtgactgtatcacacgcgccatatactattacttatcacgatgattgggaaccagtaatgagtcaattggtagagttttataacgaagtagccagttggctgctacgagacgagacgtcgcctattcctgataagttctttatacagttgaaacaaccgcttagaaataaacgagtatgtgtgtgcggtatagatccgtatccgaaagatggaactggtgtaccgttcgaatcaccaaattttacaaaaaaatcaattaaggagatagcttcatctatatctagattaaccggagtaattgattataaaggttataaccttaatataatagacggggttataccctggaattattacttaagttgtaaattaggagaaacaaaaagtcacgcgatctactgggataagatttccaagttactgctgcagcatataactaaacacgttagtgttctttattgtttgggtaaaacagatttctcgaatatacgggccaagttagaatccccggtaactaccatagtcggatatcatccagcggctagagaccgccaattcgagaaagatagatcatttgaaattatcaacgttttactggaattagacaacaaggcacctataaattgggctcaagggtttatttattaatgctttagtgaaattttaacttgtgttctaaatggatgcggctattagaggtaatgatgttatctttgttcttaagactataggtgtcccgtcagcgtgcagacaaaatgaagatccaagatttgtagaagcatttaaatgcgacgagttagaaagatatattgagaataatccagaatgtacactattcgaaagtcttagggatgaggaagcatactctatagtcagaattttcatggatgtagatttagacgcgtgtctagacgaaatagattatttaacggctattcaagattttattatcgaggtgtcaaactgtgtagctagattcgcgtttacagaatgcggcgccattcatgaaaatgtaataaaatccatgagatctaatttttcattgactaagtctacaaatagagataaaacaagttttcatattatctttttagacacgtataccactatggatacattgatagctatgaaacgaacactattagaattaagtagatcatctgaaaatccactaacaagatcgatagacactgccgtatataggagaaaaacaactcttcgggttgtaggtactaggaaaaatccaaattgcgacactattcatgtaatgcaaccaccgcatgataatatagaagattacctattcacttacgtggatatgaacaacaatagttattacttttctctacaacaacgattggaggatttagttcctgataagttatgggaaccagggtttatttcattcgaagacgctataaaaagagtttcaaaaatattcattaattctataataaactttaatgatctcgatgaaaataattttacaacggtaccactggtcatagattacgtaacaccttgtgcattatgtaaaaaacgatcgcataaacatccgcatcaactatcgttggaaaatggtgctattagaatttacaaaactggtaatccacatagttgtaaagttaaaattgttccgttggatggtaataaactgtttaatattgcacaaagaattttagacactaactctgttttattaaccgaacgaggagaccatatagtttggattaataattcatggaaatttaacagcgaagaacccttgataacaaaactaattttgtcaataagacatcaactacctaaggaatattcaagcgaattactctgtccaagaaaacgaaagactgtagaagctaacatacgagacatgttagtagattcagtagagaccgatacctatccggataaacttccgtttaaaaatggtgtattggacctggtagacggaatgttttactctggagatgatgctaaaaaatatacgtgtactgtatcaaccggatttaaatttgacgatacaaagttcgtcgaagacagtccagaaatggaagagttaatgaatatcattaacgatatccaaccattaacggatgaaaataagaaaaatagagagctatatgaaaaaacattatctagttgtttatgcggtgctaccaaaggatgtttaacattcttttttggagaaactgcaactggaaagtcgacaaccaaacgtttgttaaagtctgctatcggtgacctgtttgttgagacgggtcaaacaattttaacagatgtattggataaaggacctaatccatttatcgctaacatgcatttgaaaagatctgtattctgtagcgaactacctgattttgcctgtagtggatcaaagaaaattagatctgacaatattaaaaagttgacagaaccttgtgtcattggaagaccgtgtttctccaataaaattaataatagaaaccatgcgacaatcattatcgatactaattacaaacctgtttttgataggatagataacgcattaatgagaagaattgccgtcgtgcgattcagaacacacttttctcaaccttctggtagagaggctgctgaaaataatgacgcgtacgataaagtcaaactattagacgaggggttagatggtaaaatacaaaataatagatatagattcgcatttctatacttgttggtgaaatggtacagaaaatatcatgttcctattatgaaactatatcctacacccgaagagattcctgactttgcattctatctcaaaataggtactctgttagtatctagctctgtaaagcatattccattaatgacggacctctccaaaaagggatatatattgtacgataatgtggtcactcttccgttgactactttccaacagaaaatatccaagtattttaattctagactatttggacacgatatagagagcttcatcaatagacataagaaatttgccaatgttagtgatgaatatctgcaatatatattcatagaggatatttcatctccgtaaatatatgctcatatatttatagaagatatcacatatctaaatgaataccggaatcatagatttatttgataatcatgttgatagtataccaactatattacctcatcagttagctactctagattatctagttagaactatcatagatgagaacagaagcgtgttattgttccatattatgggatcaggtaaaacaataatcgctttgttgttcgccttggtagcttccagatttaaaaaggtttacattctagtgcctaatatcaacattttgaaaatttttaattataatatgggtgtagctatgaacttgtttaatgacgaattcatagctgagaatatctttattcattccacaacaagtttttattctcttaattataacgataacgtcattaattataacggattatctcgctacaataactctatttttatcgttgatgaggcacataatatctttgggaataatactggagaacttatgaccgtgataaaaaataaaaacaagattccttttctactattgtctggatctcccattactaacacacctaatactctgggtcatattatagatttaatgtccgaagagacgatagattttggtgagattattagtcgtggtaagaaagtaattcagacacttcttaacgaacgcggtgtgaatgtacttaaggatttgcttaaaggaagaatatcatattacgaaatgcctgataaagatctaccaacgataagatatcacggacgtaagtttctagatactagagtagtatattgtcacatgtctaaacttcaagagagagattatatgattactagacgacagctatgttatcatgaaatgtttgataaaaatatgtataacgtgtcaatggcagtattgggacaacttaatctgatgaataatttagatactttatttcaggaacaggataaggaattgtacccaaatctgaaaataaataatggcgtgttatacggagaagaattggtaacgttaaacattagttccaaatttaaatactttattaatcggatacagacactcaacggaaaacattttatatacttttctaattctacatatggcggattggtaattaaatatatcatgctcagtaatggatattctgaatataatggttctcagggaactaatccacatatgataaacggcaaaccaaaaacatttgctatcgttactagtaaaatgaaatcgtctttagaggatctattagatgtgtataattctcctgaaaacgatgatggtagtcaattgatgtttttgttttcgtcaaacattatgtccgaatcctatactctgaaagaggtaaggcatatttggtttatgactatcccagatactttttctcaatacaaccaaattcttggacgatctattagaaaattctcttacgccgatatttctgaaccagttaatgtatatcttttagccgccgtatattccgatttcaatgacgaagtaacgtcattaaacgattacacacaggatgaattgattaatgttttaccatttgacatcaaaaagctgttatatctaaaatttaagactaaagaaacgaatagaatatactctattcttcaagagatgtctgaaacgtattctcttccaccacatccatcaattgtaaaagttttattgggagaattggtcagacaatttttttataataattctcgtattaagtataacgactccaagttacttaaaatggttacatcagttataaaaaataaagaagacgctaggaattacatagatgatattgtaaacggtcacttctttgtatcgaataaagtatttgataaatctcttttatacaaatacgaaaacgatattattacagtaccgtttagactttcctacgaaccatttgtttggggagttaactttcgtaaagaatataacgtggtatcttctccataaaactgatgaaatatataaagaaataaatgtcgagctttgttaccaatggataccttccagttacattggaaccacacgagctgacgttagacataaaaactaatattaggaatgccgtatataagacgtatctccatagagaaattagtggtaaaatggccaagaaaatagaaattcgtgaagacgtggaattacctctcggcgaaatagttaataattctgtagttataaacgttccgtgtgtaataacctacgcgtattatcacgttggggatatagtcagaggaacattaaacatcgaagatgaatcaaatgtaactattcaatgtggagatttaatctgtaaactaagtagagattcgggtactgtatcatttagcgattcaaagtactgcttttttcgaaatggtaatgcgtatgacaatggcagcgaagtcactgccgttctaatggaggctcaacaaggtatcgaatctagttttgtttttctcgcgaatatcgtcgactcataaaaaagagaatagcggtaagtataaacacgaatactatggcaataattgcgaatgttttattctcttcgatatatttttgataatatgaaaaacatgtctctctcaaatcggacaaccatctcataaaatagttctcgcgcgctggagaggtagttgctgctcgtataatctccccagaataatatacttgcgtgtcgtcgttcaatttatacggatttctatagttctctgttatataatgcggttttccatcatgattagacgacgacaatagtgttctgaatttagatagttgatcagaatgaatgtttattggcgttggaaaaattatccatacagcgtctgcagagtggttgatagttgttcctagatatgtaaaataatccaacttactaggcagcaaattgtctagataaaatactgaatcaaacggtgcagacgtattggcggatctaatggaatccaattgattaactatcttttgaaaatatacatttttatgatccaatacttgtaagaatatagaaataatgataagtccatcatcgtgtttttttgcctcttcataagaactatattttttcttattccaatgaacaagattaatctctccagagtatttgtacacatctatcaagtgattggatccataatcgtcttcctttccccaatatatatgtagtgatgataacacatattcattggggagaaaccctccacttatatatcctcctttaaaattaatccttactagttttccagtgttctggatagtggttggtttcgactcattataatgtatgtctaacggcttcaatcgcgcgttagaaattgcttttttagtttctatattaataggagatagttgttgcggcatagtaaaaatgaaatgataactgtttaaaaatagctcttagtatgggaattacaatggatgaggaagtgatatttgaaactcctagagaattaatatctattaaacgaataaaagatattccaagatcaaaagacacgcacgtgtttgctgcgtgtataacaagtgacggatatccgttaataggagctagaagaacttcattcgcgttccaggcgatattatctcaacaaaattcagattctatctttagagtatccactaaactattacggtttatgtactacaatgaactaagagaaatctttagacggttgagaaaaggttctatcaacaatatcgatcctcactttgaagagttaatattattgggtggtaaactagataaaaaggaatctattaaagattgtttaagaagagaattaaaagaggaaagtgatgaacgtataacagtaaaagaattcggaaatgtaattctaaaacttacaacgcgcgataaattatttaataaagtatatataggttattgcatggcgtgttttattaatcaatcgttggaggatttatcgcatactagtatttacaatgtagaaattagaaagattaaatcattaaatgattgtattaacgacgataaatacgaatatctgtcttatatttataatatgctagttaatagtaaatgaacttttacagatctagtataattagtcagattattaagtataatagacgactagctaagtctattatttgcgaggatgactctcaaattattacactcacggcattcgttaaccaatgcctatggtgtcataaacgagtatccgtgtccgctattttattaactactgataacaaaatattagtatgtaacagacgagatagttttctctattctgaaataattagaactagaaacatgtttagaaagaaacgattatttctgaattattccaattatttgaacaaacaggaaagaagtatactatcgtcatttttttctctagatccagctactgctgataatgatagaatagacgctatttatccgggtggcatacccaaaaggggtgagaatgttccagagtgtttatccagggaaattaaagaagaagttaatatagacaattcttttgtattcatagacactcggttttttattcatggcatcatagaagataccattattaataaattttttgaggtaatcttctttgtcggaagaatatctctaacgagtgatcaaatcattgatacatttaaaagtaatcatgaaatcaaggatctaatatttttagatccgaattcaggtaatggactccaatacgaaattgcaaaatatgctctagatactgcaaaactcaaatgttatggccatagaggatgttattacgaatcattaaaaaaattaactgaggatgattgattagaaaatataaattaatttaccatcgtgtatttttataacgggattgtccggcatatcatgtagatagttaccgtctacatcgtatactcgaccatctacgcctttaaatcctctatttattgacattaatctattagaattggaataccaaatattagtaccctcaattagtttattggtaatatttttgttagacgatagatcgatggctcttgaaaccaaggttttccaaccggactcattgtcgatcggtgagaagtctttttcattagcatgaatccattctaatgatgtatgtttaaacactctaaacaattggacaaattcttttgatttgctttgaatgatttcaaataggtcttcgtctacagtaggcataccattagataatctagccattataaagtgcacgtttacatatctacgttctggaggagtaagaacgtgactattgagacgaatggctcttcctactatctgacgaagagacgcctcgttccatgtcatatctaaaatgaagatatcattgattgagaagaagctaataccctcgcctccactagaagagaatacgcatgttttaatgcattctccgttagtgtttgattcttggttaaactcagccaccgccttgattctagtatcttttgttctagatgagaactctatattagagataccaaagactttgaaatatagtaataagatttctattcctgactgattaacaaatggttcaaagactagacatttaccatgggatgctaatattcccaaacatacatctataaatttgacgcttttctcttttaattcagtaaatagagagatatcagccgcactagcatcccctcccaatagttctccccttttaaaggtatctaatgcagatttagaaaattctctatctcttaatgaatttttaaaatcattatatagtgttgctatctcttgcgcgtattcgcccggatcacgattttgtctttcaggaaagctatcgaacgtaaacgtagtagccatacgtctcagaattctaaatgatgatatacctgtttttatttcagcgagtttagccttttgataaatttcttcttgctttttcgacatattaacgtatcgcattaatactgttttcttagcgaatgatgcagacccttctacgtcatcaaaaatagaaaactcgttattaactatgtacgaacataggcctcctagtttggagactaattctttttcatcaactagacgtttattctcaaatagcgattggtgttgtaaggatcctggtcgtagtaagttaaccaacatggtgaattcttgcacactattgacgataggtgtagccgataaacaaatcatcttatggttttttaatgcgatggtcttagataaaaaattatatactgaacgagtaggacggatcttaccatcttctttgattaatgatttagaaatgaagttatgacattcatcaataatgacgcatattctactcttggaattaatagttttgatattagtaaaaaatttatttctaaaattttgatcatcgtaattaataaaaatacaatccttcgttatctctggagcgtatctgagtatagtgttcatccaaggatcttctatcaaagcctttttcaccaataagataatagcccaattcgtataaatatccttaagatgtttgagaatatatacagtagtcattgttttaccgacacccgtttcatggaacaataaaagagaatgcatactgtctaatcctaagaaaactcttgctacaaaatgttgataatccttgaggcgtactacgtccgaccccatcatttcaacaggcatattagtagttctgcgcaatgcataatcgatataggccgcgtgtgatttactcatttatgagtgataagtaataactatgttttaaaaatcacagcagtagtttaactagtcttctctgatgtttgttttcgatactttttgaatcagaagtcatactagaataaagcaacgagtgaacgtaatagagagcttcgtatactctattcgaaaactctaagaacttattaatgaattccgtatccactggattgtttaaaatactaaattgaacactgttcacatccttccaagaagaagacttagtgacggacttaacatgagacataaataaatccaaattttttttacaaacatcactagccaccataatggcgctatcttttaaccagctatcgcttacgcattttagcagtctaacatttttaaagagactacaatatattctcatagtatcgattacacctctaccgaataaagttggaagtttaataatacaatatttttcgtttacaaaatcaaataatggtcgaaacacgtcgaaggttaacatcttataatcgctaatgtatagattgttttcagtgagatgattattagatttaatagcatctcgttcacgtttgaacagtttattgcgtgcgctgaggtcggcaactacggcgtccgctttagtactcctcccataatactttacgctattaatctttaaaatttcatagactttatctagatcgctttctggtaacatgatatcatgtgtaaaaagttttaacatgtcggtcggcattctatttagatcattaactctagaaatctgaagaaagtaattagctccgtattccagactaggtaatgggcttttacctagagacagattaagttctggcaatgtttcataaaatggaagaaggacatgcgttccctcccggatattttttacaatttcatccatttacaactctatagtttgttttcattattattagttattatctcccataatcttggtaatacttaccccttgatcgtaagataccttatacaggtcattacatacaactaccaattgtttttgtacataatagattggatggttgacatccatggtggaataaactactcgaacagatagtttatctttccccctagatacattagccgtaatagttgtcggcctaaagaatatctttggtgtaaagttaaaagttagggttcttgttccattattgctttttgtcagtagttcattataaattctcgagatgggtccgttctctgaatatagaacatcatttccaaatctaacttctagtctagaaataatatcggtcttattcttaaaatctattcccttgatgaagggatcgttaatgaacaaatccttggcctttgattcggctgatctattatctccgttatagacgttacgttgactagtccaaagacttacaggaatagatgtatcgatgatgttgatactatgtgatatgtgagcaaagattgttctcttagtggcatcactatatgttccagtaatggcggaaaactttttagaaatgttatatataaaagaattttttcgtgttccaaacattagcagattagtatgaagataaacactcatattatcaggaacattatcaatttttacatacacatcagcatcttgaatagaaacgataccatcttctggaacctctacgatctcggcagactccggataaccagtcggtggaccatcgctaacaataactagatcatccaacaatctactcacatatgcatctatataatctttttcatcttgtgagtaccctggatacgaaataaatttattatccgtatttccataataaggtttagtataaacagagagcgatgttgccgcatgaacttcagttacagtcgccgttggttggtttatttgacctattactctcctaggtttctctataaatgatggtttaatttgtacattcttaaccatatatccaataaagctcaattcaggaacataaacaaattctttgttgaacgtttcaaagtcgaacgaagagtcacgaataacgatatcggatactggattgaaggttaccgttacggtaatttttgaatcggatagtttaagactgctgaatgtatcttccacatcaaacggagttttaatataaacgtatactgtagatggttctttaatagtgtcattaggagttaggccaatagaaatatcattaagttcactagaatatccagagtgtttcaaagcaattgtattattgatacaattattatataattcttcgccctcaatttcccaaataacaccgttacacgaagagatagatacgtgattaatacatttatatccaacatatggtacgtaaccgaatcttcccatacctttaacttctggaagttccaaactcagaaccaaatgattaagcgcagtaatatactgatccctaatttcgaagctagcgatagcctgattgtctggaccatcgtttgtcataactccggatagagaaatatattgcggcatatataaagttggaatttgactatcgactgcgaagacattagaccgtttaatagagtcatccccaccgatcaaagaattaatgatagtattattcattttctatttaaaatggaaaaagcttacaataaactccgtagagaaatatctataatttgtgagttttccttaaagtaacagcttccgtaaacgccgtctttatctcttagtaagtttattgtatttataaccttttccttatcttcatagaatactaaaggcaacaaagaaatttttggttcttctctaagagctacgtgagacttaaccatagacgccaacgaatccctacatattttagaacagaaatacccaacttcaccacccttgaatgtctcaatactaataggtttaaaaaccaaatcttgattacaaaaccaacacttatcaattacactatttgtcttaatagacacatctgccatagatttataatactttggtagtatacaagcgagtgcttcttctttagcgggcttaaagactgctttaggtgctgaaataaccacatctggaaggcttactcgcttagccatttaattacggaactatttttttatacttctaatgagcaagtagaaaacctctcatctacaaaaacatactcgtgtccataatcctctaccatagttacacgttttttagatctcatatgtgctaaaaagttttcccatactaattggttactattatttttcgtataatttttaacagtttgaggttttagatttttagttacagaagtgatatcgaatattttatccaaaaagaatgaataattaattgtcttagaaggagtgttttcttggcaaaagaataccaagtgcttaaatatttctactacttcattaatcttttctgtactcagattcagtttctcatcttttacttgattgattatttcaaagactaacttataatcctttttatttattctctcgttagccttaagaaaactagatacaaaatttgcatctacatcatccgtggatatttgatttttttccatgatatccaagagttccgagataatttctccagaacattgatgagacaataatctccgcaatacatttctcaaatgaataagtttattagacacatggaagtttgactttttttgtacctttgtacatttttgaaataccgactcgcaaaaaatacaatattcatatccttgttcagatactataccgttgtgtctacaaccgctacataatcgtagattcatgttaacactctacgtatctcgtcgtccaatattttatataaaaacattttatttctagacgttgccagaaaatcctgtaatatttttagttttttgggctgtgaataaagtatcgccctaatattgttaccgtcttccgccaatatagtagttaaattatccgcacatgcaaaagaacaccgcttaggcggattcagtacaatgttatatttttcgtaccaactcatttaaatatcataatctaaaatagttctgtaatatgtctagcgctaatatattgatcataatcctgtgcataaattaagatacaacaatgtctcgaaatcatcgacatggcttcttccatagttagaagatcgtcgtcaaagttagcaacgtgattcatcaacatttgctgttttgaggcagcaaatactgaaccgtcgccattcaaccattcataaaaaccatcgtctgaatccattgataatttcttgtactggtttttgagagctcgcatcaatctagcatttctagctcccggattgaaaacagaaagaggatcgtacatccagggtccattttctgtaaatagaatcgtataatgtcccttcaagaagatatcagacgatccacaatcaaagaattggtctccgagtttgtaacaaactgcggactttaacctatacatgataccgtttagcatgatttctggtgatacgtcaatcggagtatcatctattagagatctaaagccggtgtaacattctccaccaaacatattcttattctgacgtcgttctacataaaacatcattgctccattaacgataacaggggaatgaacagcactacccatcacattagttcccaatggatcaatgtgtgtaactccagaacatcttccatatcctatgttaggaggagcgaacaccactcttccactattgccatcgaatgccatagaataaatatccttggaattgatagaaatcggactgtcggatgttgtgatcatcttcataggattaacaactatgtatggtgccgcctgaagtttcatatcgtaactgatgccgtttataggtctagccacagaaaccaacgtaggtctaaatccaactatagacaaaatagaagccaatatctgttcctcatctgtcataacttgagagcatccagtatgaataatcttcattagatggggatctaccgcatcatcatcgttacaataaaaaattcccattctaatgttcataattgcttttctaatcatggtatgcatgtttgctctctgaatctctgtggaaattagatctgatacacctgtaatcactatcggattatcctccgtaagacgattaaccaacaacatataattataagactttacttttctaaattcataaagttgctggattaggctataggtgtctccatgtacatacgcgttctcgagcgcaggaagtttaataccgaatagtgccatcagaataggatgaatatagtaattagtttctggttttctataaataaaagacaaatcttgtgaactagacatatcggtaaaatgcatggattggaatcgtgtagtcgacagaagaatatgatgattagatggagagtatattttatctaactctttgagttggtcaccgattctaggactagctcgagaatgaataagtactaaaggatgagtacatttcacagaaacactagcattgttcaatgtgctctttacatgggtaaggagttgaaatagctcgtttctatttgttctgacaatatttagtttattcataatgttaagcatatcctgaatagtaaagttagatgtgtcatacttgttagtagttagatatttagcaattgcattcccatcatttctcaatctcgtactccaatcatgtgtagatgctacttcgtcgatggaaaccatacaatcctttttgataggctgttgagattgattatttcctgcacgtttaggtttggtacgttgatttctagcccctgcggatataaagtcatcgtctacaatttgggacaatgaattgcatacactacaagacaaagatttatcagaagtgtgaatatgatcttcatctaccaaagaaagagtttgattagtataactagattttagtcctgcgttagatgttaaaaaaacatcgctattgaccacggcttccattatttatattcgtagtttttactcgaaagcgtgattttaatatccaatcttattacttttggaatcgttcaaaacctttgactagttgtagaatttgatctattgccctacgcgtatactcccttgcatcatatacgttcgtcaccagatcgtttgtttcggcctgaagttggtgcatatctctttcaacattcgacatgagatccttaagggccatatcgtctagattttgttgagatgctgctcctggatttggattttgttgtgctgttgtacatactgtaccaccagtaggtgtaggagtacatacagtggccacaataggaggttgaggaggtgtaaccgttggagtagtacaagaaatatttccatccgattgttgtgtacatgtagttgttggtaacgtctgagaaggttgggtagatggcggtgtcgtcgtcttttgatctttattaaatttagagataatatcctgaacagcattgctcggcgtcaacgctggaaggagtgaactcgccggcgcatcagtatcttcagacagccaatcaaaaagattagacatatcagatgatgtattagtttgttgtcgtggttttggtgtaggaacagtactactaggtagaagaataggagccggtgtagctgttggaaccggctgtggagttatatgaatagttggttgtagcggttggataggctgtctgctggcgaccgtcatattatctctagctagttgttctcgcaactgtctttgataatacgactcttgagactttagtcctatttcaatcgcttcatcctttttcgtatccggatccttttcttcagaataatagattgacgactttggtgtagaggattctgccagcccctgtgagaacttgttaaagaagtccatttaaggctttaaaattgaattgcgattataagattaaatggcagacacagacgatattatcgactatgaatccgatgatctcaccgaatacgaggatgatgaagaagaggaagaagatggagagtcactagaaactagtgatatagatcccaaatcttcttataagattgtagaatcagcatccactcatatagaagatgcgcattccaatcttaaacatatagggaatcatatatctgctcttaaacgacgctatactagacgtataagtctatttgaaatagcgggtataatagcagaaagctataacttgcttcaacgaggaagattacctctagtttcagaattttctgacgaaacgatgaagcaaaatatgctacatgtaattatacaagagatagaggagggttcttgtcctatagtcatcgaaaagaacggagaattgttgtcggtaaacgattttgacaaagatggtctaaaattccatctagactatattatcaaaatttggaaacttcaaaaacgatattagaatttatacgaatatcgttctctaaatgtcacaatcaagtctcgcatgttcagcaatttattgtcgtactttatatcgtgttcattaacgatatcttgcaaaatagtaatgattctatcttccttcgatagatattcttcagagattattgtcttatattttttcttgttatccgatatgaatttgataagactttgaacattattgatacccgtctgtttaattttttctacagatattttagttttggcagattctatcgtatctgtcaatagacatccaacatcgacattcgacgtcaattgtctataaatcaacgtataaattttagaaataacattagcgaattgttgtgcattgatgtcgttattctgaaacagtatgattttaggtagcattttcttaacaaagagaacgtatttattgttactcagttgaacagatgatatatccagattactaacgcatctgattccgtataccaaactttcagaagaaatggtgtacaattgtttgtattcattcaatgtctctttttcagaaattagtttagagtcgaatactgcaataattttcaagagatagttttcatcagataagattttatttagtgtagatatgataaaactattgttttgttggagaacttgatacgccgcgttctctgtagtcgacgctctcaaatgggaaacaatctccattatttttttggaatcggatactatatcttcggtatcttgacgcagtctagtatacatagagttaagagagattagagtttgtacattaagcaacatgtctctaaatgtggctacaaacttttcctttttcacataatctagtttattatataccgatttcacaacggcaccagatttaaggaaccagaatgaaaaactctgataactacaatatttcatcatagttacgattttatcatcttctatagttggtgtaatagcgcatacctttttctccaagactggaaccaacgtcataaaaatgtttaaatcaaaatccatatcaacatctgatgcgctaagaccagtctcgcgttcaagattatctttactaatggtgacgaactcatcatatagaactctaagtttgtccattatttatttacagatttagttgtttaatttatttgtgctcttccagagttgggatagtatttttctaacgtcggtattatattattaggatctacgttcatatgtatcataatattaatcatccacgttttgataaatctatctttagcttctgaaataacgtatttaaacaaaggagaaaaatatttagctacggcatcagacgcaataacattttttgtaaatgtaacgtatttagacgacagatcttcgttaaaaagttttccatctatgtagaatccatcggttgttaacaccattcccgcgtcagattgaataggagtttgaatagtttgttttggaaatagatccttcaataacttatagttgggtgggaaaaaatcgattttatcactagactctttcttttttactatcattacctcatgaactatttcttgaatgagtatatgtattttctttcctatatcggacgcgttcattggaaaatataccatgtcgttaactataagaatatttttatcctcgtttacaaactgaataatatcagatgtagttcgtaaacgaactatatcatcaccagcacaacatctaactatatgatatccactagtttcctttagccgtttattatcttgttccatattagcagtcattccatcatttaagaaggcgtcaaagataatagggagaaatgacattttggattctgttacgactttaccaaaattaaggatatacggacttactatctttttctcaacgtcgatttgatgaacacacgatgaaaatgtgcttctatgagattgatcatgtagaaaacaacaagggatacaatatttccgcatatcatgaaatatattaagaaatcccaccttattatatttccccaaaggatccatgcatgtaaacattatgccgttatcattaataaagacttctttctcatcggatttgtaaaagttgttactgatttttttcattccaggatctagataattaataatgatgggttttctattcttattctttgtattttggcatatcctagaccagtaaacagtttccactttggtaaaatcagcagacttttgaacgctattaaacatggcattaatggcaataactaaaaatgtaaaatatttttctatgttaggaatatggtttttcactttaatagatatatggtttttggccaaaatgatagatatttttttatccgaggatagtaaaatattattagtcgccgtctctataaaaatgaagctagtctcgatatccaattttattctagaattgataggagtcgccaaatgtaccttatacgttatatctcccttgatgcgttccatttgtgtatctatatcggacacaagatctgtaaatagttttacgttattaatcatcacggtatcgccgtcgctagataacgctaatgtaccatccaagtcccaaatggagagatttaactgttcatcgtttagaataaaatgattaccggtcatattaataaagtgttcatcgtatctagataacaacgacttataattaatgtccaagtcttgaactcgctgaatgatcttttttaacccagttagttttagattggtacgaaatatattgttaaactttgattctacagtaatgtccaaatctagttgtggaaatacttccatcaacattgtttcaaacttgataatattattatctacatcttcatacgatccaaattccggaatagatgtatcacatgctcttgccacccagataaccaaaaagtcacacgctccaggatatacattgtataaaaagctatcgttttttagtagtgtttttttctgagtatatacgaagggattaaaaatagtattatcaacgtaactatattccaaattattcttatgagaatagataataatatcgtccttaatatctaacaaatttcctaaatatccctttaattgagtcattcgaagcgtcaatagaatatgtctcttaactatttccggctgttgtatatttaaatgacttcgtaaaaaataatatatgggcgacttctcatctatgtaatcatatggagtgagatatagggctcgttctacctcctgccccttacccacctgtaataccaattgcggacttactatatatcgcatatttatatcgtggggtaaagtgaaaatctactaccgatgatgtaagtcttacaatgttcgaaccagtaccagatcttaatttggaggcctccgtagaactaggggaggtaaatatagatcaaacaacacctatgataaaggaaaatagcggttttatatcccgtagtagacgtctattcgcccatagatctaaggatgatgagagaaaactagcactacgattctttttacaaagactttattttttagatcatagagagattcattatttgttcagatgcgttgacgctgtaaaagacgtcactattaccaaaaaaaataacattatcgtggcgccttatatagcacttttaactatcgcatcaaaaggatgcaaacttacagaaacaatgattgaagcattttttccagaactatataatgaacatagtaagaaatttaaattcaactctcaagtatccatcatccaagaaaaactcggataccagtttggaaactatcacgtttatgattttgaaccgtattactctacagtagctctggctattcgagatgaacattcatctggcatttttaatatccgtcaagagagttatctggtaagttcattatctgaaataacatatagattttatctaattaatctaaaatctgatcttgttcaatggagtgctagtacgggcgctgtaattaatcaaatggtaaatactgtattgattacagtgtatgaaaagttacaactggtcatagaaaatgattcacaatttacatgttcattggctgtggaatcaaaacttccaataaaattacttaaagatagaaatgaattatttacaaaattcattaacgagttaaaaaagaccagttcattcaagataagcaaacgcgataaggatacgctactaaaatattttacttaggactggagttagaatttatagacgactcatttcgtttatcattgttactattattactattactatcattattagtgttggcattattagtattcttcttgtcatcttgttcagaaatatacagcaatgctatacctaatactaaatacattatcatgctcgcaatggctctaacaacaacgaaccaaaatgaatttggtcgtagcttttgttcacaaaaatacataaagaaatgtctacataaatctatggcgccattggctacttgaaatagcgccagtcctcctacagattttaatatagctgtataacatgacatttattcatcatcaaaagagacagagtcaccatctgtcatatttagattttttttcatgtgttcaaagtatcctctactcatttcattataatagtttatcatacttagaattttaggacggatcaatgagtaagacttgactagatcgtcagtagtaatttgtgcatcgtctattctgcatccgcttcgtcgaataatgtatagcatcgctttgagattctccatagctatcaagtctttatacaatgacatggaaatatctgtgaatactttatacttctccaacatcgatgccttaacatcatcgcctactttagcattgaaaatacgttctattgtgtagatggatgtagcaagatttttaaacaacaatgccatcttacacgatgattgcctcaagtctccaatcttttgtttagaacgattagctacagagttcaacgcttggctgactagcatattattatctttagaaattgtattcttcaatgaggcgtttatcatatctgtgatttcgttagtcatattacagtctgactgggttgtaatgttatccaacatatcacctatggatacggtacacgtaccagcatttgtaataatcctatctaagatgttgtatggcattgcgcagaaaatatcttctcctgtaatatctccactctcgataaatctactcagattattcttaaatgccttattctctggagaaaagatatcagtgtccatcatttcattaatagtatacgcagaaaagataccacgagtatcaattctatccaagatacttatcggttccgagtcacagataatggtttcctctccttcgggagatcctgcatagaaatatctaggacaatagtttctatactgtctgtaactctgataatctctaaagtcactaactgataccatgaaattgagaagatcaaacgctgaagtaatcaatttttctgcctcgtttttactacaactagttttcatcaatgtagcgacgatgtattgtttagttactcttggtctaatactgatgatagagatattattgcttcccataatggatcttctagtagtcaccttaaagcccattgatgcgaatagcagatagataaagtcttggtatgactcctttctaatatagtacggactacctttgtcacccaactttatacccacataagccataacaacctctttaatagccgtttcatgaggtttatcagccatgagcctgagtagttggaagaatctcatgaatcccgtctcagaaagtcctatatgcatgatagatttatctttcctgggaaactctcgtatagtcatagatgaaatactcttcaaagtttctgaaataagattagtaacagtcttacctccgactactctgggtaacaaacatactctaataggtgttttctctgcggagataatatcagaaaggatagagcaataagtagtattattgtgattataaagaccgaatacataacaggtagaatttataaacatcatgtcctgaaggtttttagacttgtattcctcgtaatccataccgtcccaaaacatggatttggtaactttgatagccgtagatctttgttccttcgccaacaggttaaagaaattaataaagaatttgttgtttctatttatgtccacaaattgcacgtttggaagcgccacggttacattcactgcagcattttgaggatcgcgagtatgaagtacgatgttattgtttactggtatatctggaaagaaatctaccagtctaggaataagagattgatatcgcatagaaatagtaaagtttataatctcatcatcgaagagcattttgttaccattgtaataaatatccactctgtcatatgtataaatgaagtactgttcaaacatgatgagatgtttatatgttggcatagtagtgagatcgacgtttggtaatggcaatgtattaagattaactccataatgtctagcagcatctgcgatgttataagcgtcgtcaaagcggggtcgatcttgtattgttatatattgtctaacacctataagattatcaaaatcttgtctgcttaatacaccgttaacaatttttgccttgaattcttttattggtgcattaataacatccttatagaggatgttaaacaaataagtgttatcaaagttaagatctggatatttcttttctgctagaacatccattgagtcggagccatctggtttaatataaccaccgataaatctagctctgtattctgtatccgtcaatctaatattaagaaggtgttgagtgaaaggtggaagatcgtaaaagctgtgagtattaatgataggattagtttccgaactaatgttaattggggtattaataatatctatatttccagcgttaagtgtaacattaaacagttttaattcacgtgacgtggtatcaattaaataattaatgcccaatttggatatagcagcctgaagctcatcttgtttagttacggatcctaatgagttattaagcaatatatcgaacggatgaacgaaggttgttttaagttggtcacatactttgtaatctagacatagatgcggaagaacggtagaaactatacgaaataaatattcagagtcctctaattgatcaagagtaactattgacttaataggcatcatttatttagtattaaatgacgaccgtaccagtgacggatatacaaaacgatttaattacagagttttcagaagataattatccatctaacaaaaattatgaaataactcttcgtcaaatgtctattctaactcacgttaacaacgtggtagatagagaacataatgccgccgtagtgtcatctccagaggaaatatcctcacaacttaatgaagatctatttccagatgatgattcaccggccactattatcgaacgagtacaacctcatactactattattgacgatactccacctcctacttttcgtagagagttattgatatcggaacaacgtcaacaacgagaaaaaagatttaatattacagtatcgaaaaatgctgaagcaataatggaatctagatctatgataacttctatgccaacacaaacaccatccttgggagtagtttatgataaagataaaagaattcagatgttggaggatgaagtggttaatcttagaaatcaacgatctaatacaaaatcatctgataatttagataattttaccaaaatactatttggtaagactccgtataaatcaacagaagttaataagcgtatagccatcgttaattatgcaaatttgaacgggtctcccttatcagtcgaggacttggatgtttgttcagaggatgaaatagatagaatctataaaacgattaaacaatatcacgaaagtagaaaacaaaaaattatcgtcactaacgtgattattattgtcataaacattatcgagcaagcattgctaaaactcggatttgaagaaatcaaaggactgagtaccgatatcacttcagaaattatcgatgtggagatcggagatgactgcgatgctgtagcatcaaaactaggaatcggtaacagtccggttcttaatattgtattgtttatactcaagatattcgttaaacgaattaaaattatttaatttaatacattcccatatccagacaacaatcgtctggattaatctgttcctgtcgtctcataccggacgacatattaatctttttattagtaggcatctttttagatggtttctttttcccagcattaactgagtcgatacctagaagatcgtgattgatctctccgaccattccacgaacttctaattggccgtctctaacggtaccataaactattttaccagcattagtaacagcttggacaatctgaccatccatcgcattgtacgatgtagtagtaactgttgttctacgtctaggagcaccagaagtatttttggagcccttggaggctgatgtagaagaagacgaggattttgattttggtttacatgtaatacattttgaactctttgattttgtatcacatgcgccggcagtcacatctgtttgagaattaagattattgttgcctcctttgacggctgcatctccaccgatttgcgctagtagatttttaagctgtggtgtaatcttattaactgtttcgatataatcatcgtaactgcttctaacggctaaattttttttatccgccatttagaagctaaaaatatttttatttatacagaagatttaactagattatacaatgaactaatatgatccttttccagattatttacaaacttggtattttttggttctggaggaggcgaatttaaattcggacttggattcggattttgtgagttcttgatcttattatacatcgagtataggatggcgacggtaactgctacacaaataccgatcaacaaaagaataccaatcatttattgacaataacttcactattgatcaagtatgcaatatatcatcttttcactaaataagtagtaataatgattcaacaatgtcgagatatatggacgataataatttagttcatggaaatatcgctatgattggtatgaatgactccgctaactctgtggggcgcgcagtgctttccccacatagaataaattagcattccgactgtgataataataccaagtataaacgccataatactcaatactttccatgtacgagtgggactggtagacttactaaagtcaataaaggcgaagatacacgaaagaatcaaaagaatgattccagcgattagcacgccggaaaaataatttccaatcataagcatcatgtccatttaactaataaaaattttaaatcgccgaatgaacaaagtggaatataaaccatataaaaacaatagtttgtactgcaaaaataatatctatttttgttttcgaagatatggtaaaattaaatagtagtacacagcatgttataactaacagcagcaacggctcgtaattacttatcatttactagacgaaaaggtggtgggatattttcttgctcaaataatacgaatatatcacccatccattttatgcgatgtttatatactctaatctttaatagatctatagacgacgggtttaccaacaatatagattttatcgattcatctaatttaaacccttccttaaacgtgaatgatctattatctggcataacgatgaccctacctgatgaatcggacaatgtactgggccatgtagaataaattatcaacgaattatcgtctacgaacatttatatcatttgttttaattttaggacgcgaataaatagatataaaatagaaaataacagatattacaaccagtgttatggccgcgcccaaccaggtaggcagttttattttatcttttactacaggttctcctggatgtacgtcaccaacggcggacgtagttctagtacaattagacgtaagttccgcttgggaattttttaacgctaaagagttaacgttaatcgtgcacccaacgtatttacatctagttctttgaacatcttgattataatataaccattttctatctctagattcgtcggtgcactcatgtaaccaacataccctaggtcctaaatatttatctccggaattagattttggataattcgcgcaccaacaatttctatttcctttatgatcgttacaaaagacgtataatgccgtatccccaaaagtaaaataatcaggacgaataattctaataaactcagaacaatatctcgcatccatatgtttggagcaaatatcggaataagtagacatagccggtttccgttttgcacgtaaccattctaaacaattggggtttccaggatcgtttctacaaaatccagtcatgaaatcgtcacaatgttctgtcttgtaattattattaaatatttttggacagtgtttggtatttgtcttagaacaacattttgccacgctatcactatcgcccaggagataatccttttttataaaatgacatcgttgcccggatgctatataatcagtagcgtgttttaaatccttaatatattcaggagttacctcgttctgataatagattaatgatccaggacgaaatttgaaagaactacatggttctccatgaattaatacatattgtttagcaaattcaggaactataaaactactacaatgatctatcgacataccatctatcaaacaaaacttgggtttaatttctcccggagatgtttcataatagtacgtataactttcttctgcaaacttaacagctctattatattcaggataattaaaacctaattccatatatttgtctcgtatatctgctattcctggtgctattttgattctattaagagtaacagctgcccccattcttaataatcgtcagtatttaaactgttaaatgttggtatatcaacatctaccttatttcccgcagtataaggtttgttgcaggtatactgttcaggaatggttacatttatacttcttctatagtcctgtctttcgatgttcatcacatatgcaaagaacagaataaacaaaataatgtaagaaataatattaaatatctgtgaattcgtaaatacattgattgccataataattacagcagctacaatacacacaatagacattcccacagtgttgccattacctccacgatacatttgagttactaagcaataggtaataactaagctagtaagaggcaatagaaaagatgagataaatatcatcaatatagagattagaggagggctatatagagccaagacgaacaaaatcaaaccgagtaacgttctaacatcattatttttgaagattcccaaataatcattcattcctccataatcgttttgcatcatacctccatctttaggcataaacgattgctgctgttcctctgtaaataaatctttatcaagcactccagcacccgcagagaagtcgtcaagcatattgtaatatcttaaataactcatttatatattaaaaaatgtcactattaaagatggagtataatctttatgccgaactaaaaaaaatgacttgtggtcaacccctaagtctttttaacgaagacggggatttcgtagaagttgaaccgggatcatcctttaagtttctgatacctaagggattttacgcctctccttccgtaaagacgagtctagtatttgaaacattaacaacgaccgataataaaatcactagtatcaatccaacaaatgcgccaaagttatatcctcttcaacgcaaagtcgtatctgaagtagtttctaatatgaggaaaatgatcgaatcaaaacgtcctctatacattactcttcacttggcgtgtggatttggtaagactattaccacgtgttatcttatggctacacacggtagaaaaaccgtcatttgcgtacccaataaaatgttaatacatcaatggaagacacaggtagaggcagtcggattggaacataagatatccatagatggagtaagtagtctattaaaggaactaaagactcaaagtccggatgtattaatagtagtcagtagacatctgacaaacgatgccttttgtaaatatatcaataagcattatgatttgttcatcttggatgaatcacatacgtataatctgatgaacaatacagcagttacaagatttttagcgtattatcctccgatgatgtgttattttttaactgctacacctagaccagctaaccgaatttattgtaacagtattattaatattgccaagttatccgatctaaaaaaaactatctatgcggtagatagtttttttgagccatattccacagacaatattagacatatggtaaaacgactagatggaccatctaataaatatcatatatataccgagaagttattatctgtagacgagcctagaaatcaacttattcttaataccctggtagaagaattcaagtcaggaactattaatcgcattttagttattactaaactacgtgaacatatggtattattctacaaacgattattagatcttttcggaccagaggttgtatttataggagacgcccaaaatagacgtactccagatatggtcaaatcaatcaaggaactaaatagatttatattcgtatccaccttattttattccggtactggtttagatattcctagtttggattcgttgttcatttgctcggcagtaatcaacaatatgcaaatagagcaattactagggagggtatgtcgagaaacagaactattagataggacggtatatgtatttcctaacacatccatcaaagaaataaagtacatgataggaaatttcatgcaacgaattattagtctgtctgtagataaactaggatttaaacaagaaagttatcggaaacatcaagaatccgatcccacttctgtatgtacaacatcctccagagaagaacgtgtattaaatagaatatttaactcgcaaaatcgttaagaagtttaagcgacgatccgcatgctgcgcaggccagtgtattacccctcatagtattaatataatccaatgatacttttgtgatgtcggaaatcttaaccaatttagactgacaggcagaacacgtcatgcaatcatcatcgtcatcgataactgtagtcttgggcttctttttgcggctcttcattccggaacgcacattggtgctatccatttaggtagtaaaaaataagtcagaatatgccctataacacgatcgtgcaaaacctggtatatcgtctctatctttatcacaatatagtgtatcgacatctttattattattgacctcgtttatcttggaacatggaatgggaacatttttgttatcaacggccacctttgccttaattccagatgttgtaaaattataactaaacagtctatcatcgacacaaatgaaattcttgtttagacgtttgtagtttacgtatgcggctcgttcgcgtctcattttttcagatattgcaggtactataatattaaaaataagaatgaaataacataggattaaaaataaagttatcatgacttctagcgctgatttaactaacttaaaagaattacttagtctgtacaaaagtttgaaattttcagattctgcggctatagaaaagtataattctttggtagaatggggaacatctacttactggaaaataggcgtgcaaaaggtagctaatgtcgagacgtcaatatctgattattatgatgaggtaaaaaataaaccgtttaatattgatccgggctattacattttcttaccggtatattttgggagcgtctttatttattcgaagggtaaaaatatggtagaacttggatctggaaactcttttcaaataccagatgatatgcgaagtgcgtgtaacaaagtattagacagcgataacggaatagactttctgagatttgttttgttaaacaatagatggataatggaagatgctatatcaaaatatcagtctccagttaatatatttaaactagctagtgagtacggattaaacatacccaaatatttagaaattgaaatagaggaagacacattatttgacgacgagttatactctattatagaacgctcttttgatgataaatttccaaaaatatccatatcgtatattaagttgggagaacttaggcggcaagttgtagactttttcaaattctcgttcatgtatattgagtccatcaaggtagatcgtataggagataatatttttattcctagcgttataacaaaatcaggaaaaaagatattagtaaaagatgtagaccatttaatacgatctaaggttagagaacatacatttgtaaaagtaaaaaagaaaaacacattttccattttatacgactatgatgggaacggaacagaaactagaggagaagtaataaaacgaattatagacactataggacgagactattatgttaacggaaagtatttctctaaggttggtagtgcaggcttaaagcaattgactaataaattagatattaatgagtgcgcaactgtcgatgagttagttgatgagattaataaatccggaactgtaaaacgaaaaataaaaaaccaatcagcatttgatttaagcagagaatgtttgggatatccagaagcagattttataacgttagttaataacatgcggttcaaaatagaaaattgtaaggttgtaaatttcaatattgaaaatactaattgtttaaataacccgagtattgaaactatatatggaaactttaaccagttcgtctcaatctttaatatcgtcaccgatgtcaaaaaaagattattcgagtgaaataatatgcgcctttgatataggtgcaaaaaatcctgccagaactgttttagaagtcaaggataactccgttagggtattggatatatcaaaattagactggagttctgattgggaaaggcgcatagctaaagatttgtcacaatatgaatacactacagttcttctagaacgtcagcctagaaggtcgccgtatgttaaatttatctattttattaaaggctttttatatcatacatcggctgccaaagttatttgcgtctcgcctgtcatgtctggtaattcatatagagatcgaaaaaagagatcggtcgaagcatttcttgattggatggacacattcggattgcgagactccgttccggatagacgcaaattagacgatgtagcggatagtttcaatttggctatgagatacgtattagataaatggaatactaattatacaccttataataggtgtaaatctagaaattacataaaaaaaatgtaataacgttagtaacgccattatggataatctatttacctttctacatgaaatagaagatagatatgccagaactatttttaactttcatctaataagttgcgatgaaataggagatatatatggtcttatgaaagaacgcatttcctcagaggatatgtttgataatatagtatataataaagatatacatcctgccattaagaaactagtgtattgcgacatccaacttactaaacacattattaatcagaatacgtatccggtatttaacgattcttcacaagtgaaatgttgtcattatttcgacataaactcagataatagcaatattagctctcgtacagtagagatatttgagagggaaaagtcatctcttgtatcatatattaaaactaccaataagaagagaaaggtcaattacggcgaaataaagaaaactgttcatggaggcactaatgcaaattacttttccggtaaaaagtctgacgagtatctgagtactacagttagatccaacattaatcaaccttggatcaaaaccatttctaagagaatgagagtagatatcattaatcactctatagtaacgcgtggaaaaagctctatattacaaactatagaaattatttttactaatagaacatgtgtgaaaatattcaaggattctactatgcacattattctatccaaggacaaggatgaaaaggggtgtatacacatgattgacaaattattctatgtctattataatttatttctgttgttcgaagatatcatccaaaacgagtactttaaagaagtagctaatgttgtaaaccacgtacttacggctacggcattagatgagaaattattcctaattaagaaaatggctgaacacgatgtttatggagttagcaatttcaaaatagggatgtttaacctgacatttattaagtcgttggatcataccgttttcccctctctgttagatgaggatagcaaaataaagttttttaaggggaaaaagctcaatattgtagcattacgatctctggaggattgtataaattacgtgactaaatccgagaatatgatagaaatgatgaaggaaagatcgactattttaaatagcatagatatagaaacggaatcggtagatcgtctaaaagaattgcttctaaaatgaaaaaaaacactgattcagaaatggatcaacgactagggtataagtttttggtgcctgatcctaaagccggagttttttatagaccgttacatttccaatatgtatcgtattctaattttatattgcatcgattgcatgaaatcttgaccgtcaagcggccactcttatcgtttaagaataatacagaacgaattatgatagaaattagcaatgttaaagtgactcctccagattactcacctataatcgcgagtattaaaggtaagagttatgatgcattagccacgttcactgtaaatatctttaaagaggtaatgaccaaagagggtatatccatcactaaaataagtagttatgagggaaaagattctcatttgataaaaattccgctactaataggatacgggaataaaaatccacttgatacagccaagtatcttgttcctaatgtcataggtggagtctttatcaataaacaatctgtcgaaaaagtaggaattaatctagtagaaaagattacaacatggccaaaatttagggttgttaagccaaactcattcactttctcgttttcctccgtatcccctcctaatgtattaccgacaagatatcgccattacaagatatctctggatatatcacaattggaagcgttgaatatatcatcgacaaagacatttataacggtcaatattgttttgctgtctcaatatttatctagagtgagtctagaattcattagacgtagtttatcatacgatatgcctccagaagttgtctatctagtaaacgcgataatagatagtgctaaacgaattactgaatctattactgactttaatattgatacatacattaatgacctggtggaagctgaacacattaaacaaaaatctcagttaacgatcaacgagttcaaatatgaaatgctgcataactttttacctcatatgaactatacacccgatcaactaaagggattttatatgatatctttactaagaaagtttctctactgtatctaccacacttctagatatccagatagagattcgatggtttgtcatcgcatcctaacgtacggcaaatattttgagacgttggcacatgatgaattagagaattacataggcaacatccgaaacgatatcatgaacaatcacaagaacagaggcacttacgcggtaaacattcatgtactaacaactcccggacttaatcacgcgttttctagcttattgagtggaaagttcaaaaagtcagacggtagttatcgaacacatcctcactattcatggatgcagaatatttctattcctaggagtgttggattttatccggatcaagtaaagatttcaaagatgttttctgtcagaaaataccatccaagtcaatatctttacttttgttcatcggacgttccggaaagaggtcctcaggtaggtttagtatctcaattgtctgtcttgagttccattacaaatatactaacgtctgagtatttggatttggaaaagaaaatttgtgagtatatcagatcatattataaagatgatataagttactttgaaacaggatttccaatcactatagaaaatgctctagtcgcatctcttaatccaaatatgatatgtgattttgtaactgactttagacgtagaaaacggatgggattcttcggtaacttggaggtaggtattactttagttagggatcacatgaatgaaattcgcattaatattggagcgggaagattagtcagaccattcttggttgtggataacggagagctcatgatggatgtgtgtccggagttagaaagcagattagacgacatgacattctctgacattcagaaagagtttccgcatgtcatcgaaatggtagatatagaacaatttacttttagtaacgtatgtgaatcggttcaaaaatttagaatgatgtcaaaggatgaaagaaagcaatacgatttatgtgactttcctgccgaatttagagatggatatgtggcatcttcattagtgggaatcaatcacaattctggacccagagctattcttggatgtgctcaagctaaacaagctatctcttgtctgagttcggatatacgaaataaaatagacaatggaattcatttgatgtatccagagaggccaatcgtgattagtaaggctttagaaacttcaaagattgcggctaattgcttcggccaacatgttactatagcattaatgtcgtacaaaggtatcaatcaagaggatggaattatcatcaaaaaacaatttattcagagaggcggtctcgatatagttaccgcaaagaaacatcaagtagaaattccgttggaaaactttaataacaaagaaagagataggtctaacgcctattcaaaattagaaagtaatggattagttagactgaatgctttcttggaatccggagacgctatggcacgaaatatctcatcaagaactcttgaagatgattttgctagagataatcagattagcttcgatgtttccgagaaatataccgatatgtacaaatctcgcgttgaacgagtacaagtagaacttactgacaaagttaaggtacgagtattaaccatgaaagaaagaagacccattctaggagataaatttaccactagaacgagtcaaaagggaacagtcgcgtatgtcgcggatgaaacggaacttccatacgacgaaaatggtatcacaccagatgtcattattaattctacatccatcttctctagaaaaactatatctatgttgatagaggttattttaacagccgcatattctgctaagccgtacaacaataagggagaaaaccgacctgtctgttttcctagtagtaacgaaacatccatcgatacatatatgcaattcgctaaacaatgttatgagcattcaaatccgaaattgtccgatgaagaattatcggataaaatcttttgtgaaaagattctctatgatcctgaaacggataagccttatgcatccaaagtattttttggaccaatttattacttgcgtctgaggcatttaactcaggacaaggcaaccgttagatgtagaggtaaaaagacgaagctcattagacaggcgaatgagggacgaaaacgtggaggaggtatcaagttcggagaaatggagagagactgtttaatagcgcatggcgcagccaatactattacagaagttttaaaagactcagaagaggattatcaagatgtgtatgtttgtgaaaattgtggagacatagcagcacaaatcaagggtattaatacatgtcttagatgttcaaaacttaatctctctcctctcttaacaaaaattgataccacgcacgtatctaaagtatttcttactcaaatgaacgccagaggcgtaaaagtcaaattagatttcgaacgaaggcctccttcgttttataaaccattagataaagttgatctcaagccgtcttttctggtgtaatattctagtttggtagtagatacatatcaatatcatcaaattcgagatccgaattataaaatgggcgtggattgttaactatagaatcggacgtctgatattcgaaaatctgtggagttttaggttttggtggaggtgtaactgctacttgggatactgaagtctgatattcagaaagctgggggatgttctggttcgacatccaccgatggtgtcacatcactaatcggttcggtaacgtctgtggatggaggtgctacttctacagaacctgtagcctcagttgtcaacggagatacatttttaatgcgaggaaatgtataatttggtaatggtttctcatgtggatctgaagaagaggtaagatatctactagaaagataccgatcacgttctagttctcttttgtagaacttaactttttctttctcagcatctagttgatattccaacctcttcacgttactacgttcagattccaattcacgttcgcatgggttacctccgcagtttttacgagcgatttcacgttcagccttcatgcgtctctccttctctctatcgagtttatcagagcagtctttctgaaggcgatcgaactccataaatttctccaacgctttgattgtttccatagatttccgaagttcagcttttaggactgtgattctttttctttcgaattcacagctggatgtgcaaccgtttccattaccgccatctctaagtttcttttctagatcggcaacatttcatccccatgccttttacattcctcgagtctactgtcgtcgaaatatcgttccagctccttttcgacatcaataactttagcacgttgtctctcaagctctcttttgtagttatctgattccctggcacgtttaagatcttcatgcaattgagtcagctcttaacacaatctcttgcttcttcgtcatagtacttacaatcactatgggatccattgttaccacgtctacactcggcgagctcgcgtttaagagattcaatttcccgtttgtattggtccatgtttccattgctaccaccattagatttacaggctgctagttgtcgttcgagatcagaaatacgggttttcttggaattgatttcgtcgatgtacttggcatcgaaacacttattaagttctttttccaattctacgattttatttctttcgcgagtcaattccctcctgtagtaactatctgttttgtcagattcacgctctctacgtagactttcttgcaagttactaatttgttccctagcacgtccgagtttagttttatatgctgaatagagttctgattcatcctttgagcagatctctagcgatcgtttaagattcctgattctagtctttagcctatttacctcctcagaagatgttccgttaccgttgcgtttacactcgttaagctgtctatcaagatccatgattctatctctaagacgttgcatctctctttccatatcagcattgctttcattattacgtctgcagtcactcaactgtctttcaatatctgagattctatctctaagacgtcgcatctctctctgtttcggcattggtttcattattacgtctacagtcgttcaactgtctttcaagatctgatattctagattggagtctgctaatctctgtagcattttcacggcattcactcagttgtctttcaagatctgagattttagattggagtctgctaatctctgtaagatttcctcctccgctctcgatgcagtcggtcaacttattctctagttctctaatacgcgaacgcagtgcatcaacttcttgcgtgtcttcctggttgcgtgtacattcatcgagtctagattcgagatctctaacgcgtcgtcgttcttcctcaagttctctgcgtactacagaaagcgtgtccctatcttgttgatatttagcaatttctgattctagagtactgattttgcttacgtagttactaatagttgtcttggccttatcaagatcctccttgtatttgtcgcattccttgatatccctacgaagtctggacagttcccattcgacattacgacgtttatcgatttcagctcggagatcgtcatcgcgttgttttagccacatacgactgagttcaagttctcgttgacaagatccatctacttttccattcctaatagtatccagttccttttctagttctgaacgcatttctcgttccctatcaagcgattctctcaattctcggatagtcttcttatcaatttctaataaatctgaaccatcatctgtcccattttgaatatccctgtgttctttgatctcttttgtaagtcggtcgattctttcggttttataaacagaatccctttccaaagtcctaatcttactgagtttatcactaagttctgcattcaattcggtgagttttctcttggcttcttccaactctgttttaaactctccactatttccgcattcttcctcgcatttatctaaccattcaattagtttattaataactagttggtaatcagcgattcctatagccgttcttgtaattgtgggaacataattaggatcttctaatggattgtatggcttgatagcatcatctttatcattattagggggatggacaaccttaattggttggtcctcatctcctccagtagcgtgtggttcttcaataccagtgttagtaataggcttaggcaaatgcttgtcgtacgcgggcacttcctcatccatcaagtatttataatcgggttctacgtctgaatattcttttctaagagacgcgacttcgggagttagtagaagaactctgtttctgtatctatcaacgctggaatcaatactcaagttaaggatagcgaatacctcatcgtcatcatccgtatcttctgaaacaccatcatatgacatttcatgaagtctaacgtattgataaatagaatcagatttagtattaaacagatccttaacctttttagtaaacgcatatgtatattttagatctccagatttcataatatgatcacatgccttaaatgtcagtgcttccatgatataatctggaacactaatgggtgacgaaaaagatacagcaccatatgctacgttgataaataaatctgaaccactaagtagataatgattaatgttaaggaagaggaaatattcagtatatagatatgccttagcatcatatcttgtactaaacacgctaaacagtttattgatgtgatcaatttccaacagaataattagagcagcgggaataccaacaaacatattaccacatccgtattttctatgaatatcacatatcatgttaaaaaatcttgatagaagagcgaatatctcgtctgacttaatgagtcgtagttcagcagcaacataagtcataactgtaaatagaacatactttcctgtagtgttgattctagactccacatcaacaccattattaaaaatagttttatatacatctttaatctgctctccgttaatcgtcgaacgttctagtatacggaaacactttgatttcttatctgtagttaatgacttagtgatatcacgaagaatattacgaattacatttcttgtttttcttgagagacctgattcagaactcaactcatcgttccatagtttttttacctcagtggcgaaatctttggagtgcttggtacatttttcaataaggttcgtgacctccatttattataaaaaattttattcaaaacttaactacaatcgggtaattataaaatcgtagatctcccatgtggtggaatactaccatctatcgcatgtggatggacagtaggtaatggccatgggaacagtaatgtttgcatatttatctttcttgccagtattactgcatattgtcccaatgtttcgatgtgatgttctaacctatcaactgccgctgtatcacaacaatagtgtccgatgaaattaagattatgatccaatgtgtttaatatatgattatcaagtcttatacgatccgcgtcttttttgacaggatcaggttcttctacaggaagaagtttcggcctcttatgatattcatgtctgggaaacggtggtctagggtgaggctccggtatcggagtgggttttggattataatcatcatcgtctatgacatcatcttcgacttcgatatttattttgctatcttgatgatgtcctgtatcagttgcattttcagcactcgactgaatattagcgcattcattgtctattattaccatatttctaaacccaaaatgtatgtgttgaacatcagtactatcgttgatgagtcttatagcatgaattcgcttatcgttatcgggtttatcttctgtcaccttagcaattccttttttattaaactctacataatcatatccatttctattgtttgttctaatataaacgagtatagcatcattgctaaatttttcaatagtatcgaaaacagaatatcctaaaccatataatatatattcagggacactcaaactaaatgtccaggattctcctaaatacgtaaactttaatagtgcgaaatcattcaaaaatctaccacttatagatagatagtacataaatgcgtatagtagtctacctatctctttattatgaaaaccggcattacgatcatatatgtcgtgatatacctgtgatccgtttacgttaaaccataaatacatgggtgatcctataaacatgaatttatttctaattctcagagctatagttaattgaccgtgtaatatttgcttacatgcatacttgatacgctcattaataaaatttttatcattgctcgttatctcagaatcgtatatataaggagtaccatcgtgattcttaccagatattatacaaaatactatatataaaatatattgaccaacgttagtaatcatataaatgtttaacgttttaaattttgtattcaatgatccattatcatacgctagcatggtcttatgatattcattctttaaaatataatattgtgttagccattgcattggggctcctaatggagattttttattctcatccattttaggataggctttcataaagtccctaataacttcgtgaataatgtttctatgttttctactgatgcatgtatttgcttcgatttttttatcccatgtttcatctatcatagatttaaacgcagtaatgctcgcaacattaacatcttgaaccgttggtacaattccgttccataaatttataatgttcgccatttatataactcattttttgaatatacttttaattaacaaaagagttaagttactcatatgggcgccgtccagtctgaacatcaatctttttagccagagatatcatagccgctcttagagtttcagcgtgattttccaacctaaatagaacttcatcgttgcgtttacaacacttttctatttgttcaaactttgttgttacattagtaatctttttttccaaattagttagccgttgtttgagagtttcctcattgtcgtcttcatcggctttaacaattgcttcgcgtttagcctctggctttttagcagcctttgtagaaaaaaattcagttgctggaattgcaagatcgtcatctccggggaaaagagttccgtccatttaaagtacagattttagaaactgacactctgcgttatttatatttggtacaacacatggattataaatatcgatgttaataacatcagaaaatgtaaagtctatacattgttgcatcgtgttaaattttctaatggatctagtattattgggtccaacttctgcctgaaatccaaatatggaagcggatacaaaaccgtttcctggataaaccacacatctccacttttgctttacatcagaaattgtgtcgttgacatcttgaactctcctatctaatgccggtgttccacctatagattttgaatattcgaatgctgcatgagtagcattaaattccttaatattgccataattttcatatattgagtaaccctggataaaaagtaaacacaccgcagccgtcgctaccacaataaaaaaaattgatagagagttcatttataatctattagaagctgacaaaatttttttacacgcatcagacaatgctttaataaatagttcaacatctacttttgtcatatcgaaccgatggtatgattctaacctagaattacatccgaaaaagttgactatgttcatagtcattaagtcattaacaaacaacattccagactctggattataagacgatactgtttcgtcacaattacctaccttaatcatgtgattatgaatattggctattagagcaccttctaagaaatctataatatctttgaaacacgatttaaaatcaaaccacgaatatacttctacgaagaaagttagtttacccataggagaaataactataaatggagatctaaatacaaaatccggatctatgatagttttaacattattatattctctattaaatacctccacatctaaaaatgttaattttgaaactatgtcttcgtttattaccgtacctgaactaaacgctataagctctattgtttgagaactctttaaacgatattcttgaaatacatgtaacaaagtttcctttaactcggtcggtttatctaccatagttacagaatttgtatccttatctataatataataatcaaaatcgtataaagttatataattatcgcgttcagattgggatcttttcaaatagactaaaaaccccatttctctagtaagtatcttatgtatatgtttgtaaaatatcttcatggtgggaatatgctctaccgcagttagccattcctcattgacagcggtagatgtattagacaaaactattccaatgtttaacaagggccattttacgagattattaaatccttgtttgataaatgtagccaatgagggttcgagttcaacgacgattgaattctcttcccgcggatgctgcatgatgaacgacgggatgttgttcgattgatttggaattctttttcgactttttgtttatattaaatattttaaaatttatagcggatagcaattcatgtaccacggataatgtagacgcgtattgcgcatcgatatctttattattagataaatttatcaataaatgtgagaagtttgcctcgttaaggtcttccatttaaatattatataaacatttgtgtttgtatcttattcgtcttttatggaatagttttttactagtaaagctgcaattacacactttgtccgtaaaacataaatataaacaccagcttttatcaatcgttccaaaaagtcgacggcggacatttttaacatggcatctattttaaatacacttaggtttttggaaaaaacatcattttataattgtaacgattcaataactaaagaaaagattaagattaaacataagggaatgtcatttgtattttataagccaaagcattctaccgttgttaaatacttgtctggaggaggtatatatcatgatgatttggttgtattggggaaggtaacaattaataatctaaagatgatgctattttacatggatttatcatatcatggagtgacaagtagtggagcaatttacaaattgggatcgtctatcgatagactttctctaaataggactattgttacaaaagttaataattatgatgatacattttttgacgacgatgattgatcgctattgcacaattttgtttttttactttctaatatagcgtttagattctttttcatgtgcgaatattgatttactaaaatatcgatgtttaacttttgttctatgacgtccttatcagcggtatcggtacatatacgtaattcaccttcacaaaatacggagtcttcgataataatagccaatcgattattggatctagctgtctgtatcatattcaacatgtttaatatatcctttcgtttcccctttacaggcatcgatcgtagcatattttccgcgtctgagatggaaatgttaaaactacaaaaatgcgtaatgttagcccgtcctaatattggtacgtgtctataagtttggcatagtagaataatagacgtgtttaaatgccttccaaagtttaagaattctattagagtattgcattttgatagtttatcacctacatcatcaaaaataagtaaaaagtgtgctgattttttatgattttgtgcgacagcaatacatttttctatgttacttttagttcgtatcagattatattctagagattcctgactactaacgaaattaatatgatttggccaaatgtatccatcataatctgggttataaacgggtgtaaacaagaatatatgtttatattttttaactagtgtagaaaacagagatagtaaatagatagtttttccagatccagatcctcccgttaaaaccattctaaacggcatttttaataaattttctcttgaaaattgtttttcttggaaacaattcataattatatttacagttactaaattaatttgataataaatcaaaatatggaaaactaaggtcgttagtagggaggagaacaaagaaggcacatcgtgacataaataacatttattatcatgatgacaccagaaaacgacgaagagcagacatctgtgttctccgctactgtttacggagacaaaattcaaggaaagaataaacgcaaacgcgtgattggtctatgtattagaatatctatggttatttcactactatctatgattaccatgtccgcgtttctcatagtgcgcctaaatcaatgcatgtctgctaacgaggctgctattactgacgccgctgttgccgttgctgctgcatcatctactcatagaaaggttgcgtctagcactacacaatatgatcacaaagaaagctgtaatggtttatattaccagggttcttgttatatattacattcagactaccagttattctcggatgctaaagcaaattgcactgcggaatcatcaacactacccaataaatccgatgtcttgattacctggctcattgattatgttgaggatacatggggatctgatggtaatccaattacaaaaactacatccgattatcaagattctgatgtatcacaagaagttagaaagtatttttgtgttaaaacaatgaactaatatttatttttgtacattaataaatgaaatcgcttaatagacaaactgtaagtaggtttaagaagttgtcggtgccggccgctataatgatgatactctcaaccattattagtggcataggaacatttctgcattacaaagaagaactgatgcctagtgcttgcgccaatggatggatacaatacgataaacattgttatttagatactaacattaaaatgtctacagataatgcggtttatcagtgtcgtaaattacgagccagattgcctagaccggatactagacatctgagagtattgtttagtattttttataaagattattgggtaagtttaaaaaagaccaatgataaatggttagatattaataatgataaagatatagatattagtaaattaacaaattttaaacaactaaacagtacgacggatgctgaagcgtgttatatatacaagtctggaaaactggttaaaacagtatgtaaaagtactcaatctgtactatgtgttaaaaaattctacaagtgacaacaaaaaatgaattaataataagtcgttaacgtacgccgccatggacgccgcgtttgttattactccaatgggtgtgttgactataacagatacattgtatgatgatctcgatatctcaatcatggactttataggaccatacattataggtaacataaaaactgtccaaatagatgtacgggatataaaatattccgacatgcaaaaatgctactttagctataagggtaaaatagttcctcaggattctaatgatttggctagattcaacatttatagcatttgtgccgcatacagatcaaaaaataccatcatcatagcatgcgactatgatatcatgttagatatagaagataaacatcagccattttatctattcccatctattgatgtttttaacgctacaatcatagaagcgtataacctgtatacagctggagattatcatctaatcatcaatccttcagataatctgaaaatgaaattgttgtttaattcttcattctgcatatcagacggcaatggatggatcataattgatgggaaatgcaatagtaattttttatcataaaagttgtaaagtaaataataaaacaataaatattgaactagtagtacgtatattgagcaatcagaaatgatgctggtacctcttatcacggtgaccgtagttgcgggaacaatattagtatgttatatattatatatttgtaggaaaaagatacgtactgtctataatgacaataaaattatcatgacaaaattaaaaaagataaagagttctaattccagcaaatctagtaaatcaactgatagcgaatcagactgggaggatcactgtagtgctatggaacaaaacaatgacgtagataatatttctaggaatgagatattggacgatgatagcttcgctggtagtttaatatgggataacgaatccaatgtcatggcgcctagcacagaacacatttacgatagtgttgctggaagcacgctgctaataaataatgatcgtaatgaacagactatttatcagaacactacagtagtaattaatgagacggagactgttgaagtacttaatgaagataccaaacagaatcctaactattcatccaatcctttcgtaaattataataaaaccagtatttgtagcaagtcaaatccgttcattacagaactcaacaataaatttagtgagaataatccgtttagacgagcacatagcgatgattatcttaataagcaagaacaagatcatgaacacgatgatatagaatcatcggtcgtatcattggtgtgattagtttcctttttataaaattgaagtaatatttagtattattgctgccgtcacgttgtacaaatggagatattccctgtattcggcatttctaaaattagcaattttattgctaataatgactgtagatattatatagatacagaacatcaaaaaattatatctgatgagatcaatagacagatggatgaaacggtacttcttaccaacatcttaagcgtagaagttgtaaatgacaatgagatgtaccatcttattccccatagactatcgactattatactctgtattagttctgtcggaggatgtgttatctctatagataatgacatcaatgacaaaaatattctaacatttcccattgatcatgctgtaatcatatccccactgagtaaatgtgtcgtagttagcaagggtcctacaaccatattggttgttaaagcggatatacccagcaaacgattggtaacatcgtttacaaacgacatactgtatgtaaacaatctgtcactgattaattatttgccgttgtctgtattcattattagacgagtcaccgactatttggatagacacatatgcgatcagatatttgcgaataataagtggtattccattataaccatcgacgataagcaatatcctattccatcaaactgtataggtatgtcctctgccaagtacataaattctagcatcgagcaagatactttaatacatgtttgtaacctcgagcatccattcgacttagtatacaaaaaaatgcagtcgtacaattctgtacctatcaaggaacaaatattgtacggtagaattgataatataaatatgagcattagtatttctgtggattaatagatttctagtatggggatcattaatcatctctaatctctaaatacctcataaaacgaaaaaaaagctattatcaaatactgtacggaatggattcattctcttctctttttatgaaactctgttgtatatctactgataaaactggaagcaaaaaatctgataaaaagaataagaataagatcaaggattatatggaacacgattattataaaataacaatagttcctggttcctcttccacgtctactagctcgtggtattatacacatgcctagtaatagtctctttgcgttgacggaaagcagactagaaataacaggctaaaatgttcagacaccataatagttcccaacccagataataacagagtaccatcaacacattcctttaaactcaatcccaaacccaaaaccgttaaaatgtatccggccaattgatagtagataatgaggtgtacagcgcatgataatttacacagtaaccaaaatgaaaatactttagtaattataagaaatatagatggtaacgtcatcatcaacaatccaataatatgccggagagtaaacattgacggataaaacaaaaatgctccgcataactctatcatggcaataacacaaccaaatacttgtaagattcctaaattagtagaaaatacaacggatatcgatgtataagtgatctcgagaaataataagaataaagtaatgcccgtaaagataaacatcaacattgtttggtaatcattaaaccaattagtatgaagttgaactaatttcacagtagattttattccagtgttatcctcgcatgtatacgtacctggtaagatatctttatattctataatcaatgagacatcactatccgataacgaatgaagtctagcactagtatgccatttacttaatatggtcgtcttggaagttttattataagttaaaatatcatggttgtccaatttccatctaatatactttgtcggattatctatagtacacggaataatgatggtattattacatgctgtatactctatagtctttgtagatgttataatcataaaagtacagaggtatatcaacgatattctaactcttgacattttttatttatttaaaatgatacctttgttatttattttattctattttgctaacggtatcgaatggcataagtttgaaacgagtgaagaaataatttctacttacttattagacgacgtattatacacgggtgttaatggggcggtatacacattttcaaataataaactaaacaaaactggtttagctaatactaattatatcacaacatctataaaagtagaggatgcggataaggatacattagtatgcggaaccaataacggaaatcccaaatgttggaaaatagacggttcagacgacccaaaacatagaggtagaggatacgctccttatcaaaatagcaaagtaacgataatcagtcacaacggatgtgtactatctgacataaacatatcaaaagaaggaattaaacgatggagaagatttgacggaccatgtggttatgatttatacacggcggataacgtaattccaaaagatggtttacgaggagcattcgtcgataaagatggtacttatgacaaagtttacattcttttcactgatactatcggctcaaagagaattgtcaaaattccgtatatagcacaaatgtgcctaaacgacgaaggtggtccatcatcattgtctagtcatagatggtcgacgtttctcaaagtcgaattagaatgtgatatcgacggaagaagttatagacaaattattcattctagaactataaaaacagataatgatacgatactatatgtattcttcgatagtccgcattatgtacctattctatgaataccattaaacaatctttttctacgtcaaaattggaaggatatacaaagcaattgccgtctccagctcctggtatatgtctaccagctggaaaagttgttccacataccacgtttgaagtcatagaaaaatataatgtactagatgatattataaagcctttatctaaccaacctatcttcgaaggaccgtctggtgttaaatggttcgatataaaggagaaggaaaatgaacatcgggaatatagaatatacttcataaaagaaaattctatatattcgttcgatacaaaatctaaacaaactcgtagctcgcaagtcgatgcgcgactattttcagtaatggtaacttcgaaaccgttatttatagcagatatagggataggagtaggaatgccacaaatgaaaaaaatacttaaaatgtaatcttaatcgagtacaccacacgacaatgaacaaacataagacagattatgctggttatgcttgctgcgtaatatgcggtctaattgttggaattatttttacagcgacactattaaaagttgtagaacgtaaattagttcatacaccatcaatagataaaacgataaaagatgcatatattagagaagattgtcctactgactggataagctataataataaatgtatccatttatctactgatcgaaaaacctgggaggaaggacgtaatgcatgcaaagctctaaatccaaattcggatctaattaagatagagactccaaacgagttaagttttttaagaagcattagacgcggatattgggtaggagaatccgaaatattaaaccagacaaccccatataattttatagctaagaatgccacgaagaatggaactaaaaaacggaaatatatttgtagcacaacgaatactcccaaactgcattcgtgttacactatataacaattacactacatttttatcataccactacttcggttagatgttttagaaaaaaataaatatcgccgtaccgttcttgtttttataaaaataacaattaacaattatcaaattttttctttaatattttacgtggttgaccattcttggtggtaaaataatctcttagtgttggaatggaatgctgtttaatgtttccacactcatcgtatattttgacgtatgtagtcacatcgtttacgcaatagtcagactgtagttctatcatgcttcctacattagaaggaggaacagttttaaagtctcttggttttaatctattaccgttagttttcatgaaatcctttgttttatccacttcacattttaaataaatgtccactatacattcttctgttaattttactagatcgtcatgggtcatagaatttataggttccgtagtccatggatccaaactagcaaacttcgcgtatacggtatcgcgattagtgtatacaccaactgtatgaaaattaagaaaacagtttaatagatcaacagaaatatttaatcctccgtttgatacagatgcaccatatttatggattttggattcacacgttgtttgtctgaggggttcgtctagcgttgcttctacataaacttctattcccatatattctttattgtcagaatcgcataccgatttatcatcatacactgtttgaaaactaaatggtatacacatcaaaataacaaatactaacgagtacattctgcaatattgttatcgtaattggaaaaatagtgttcgagtgagttggattatgtgagtattggattgtatattttattttatattttgtaataagaataaaatgctaatgtcaagtttattccaatagatgtcttattaaaaacatatataataaataacaatggctgaatggcataaaattatcgaggatatctcaaaaaataataagttcgaggatgccgccatcgttgattacaagactacaaagaatgttctagctgctattcctaacagaacatttgccaagattaatccgggtgaaattattcctctcatcactaatcgtaatattctaaaacctcttattggtcagaaatattgtattgtatatactaactctctaatggatgagaacacgtatgctatggagttgcttactgggtacgcccctgtatctccgatcgttatagcgagaactcataccgcacttatatttttgatgggtaagccaacaacatccagacgtgacgtgtatagaacgtgtagagatcacgctacccgtgtacgcgcaactggtaattaaaataaaaagtaatattcatatgtagtgtcaattttaaatgatgatgatgaaatggataatatccatattgacgatgtcaataatgccggtattggcatacagctcatcgatttttagatttcattcagaggatgtggaattatgttatgggcatttgtattttgataggatctataatgtagtaaatataaaatataatccgcatattccatatagatataattttattaatcgcacgttaaccgtagatgaactagacgataatgtcttttttacacatggttattttttaaaacacaaatatggttcacttaatcctagtttgattgtctcattatcaggaaacttaaaatataatgatatacaatgctcagtaaatgtatcgtgtctcattaaaaatttggcaacgagtacatctactatattaacatctaaacataagacttattctctacatcggtccacgtgtattactataataggatacgattctattatatggtataaagatataaatgacaagtataatggcatctatgattttactgcaatatgtatgctaatagcgtctacattgatagtgaccatatacgtgtttaaaaaaataaaaatgaactcttaattatgctatgctattagaaatggataaaatcaaaattacggttgattcaaaaattggtaatgttgttaccatatcgtataacttggaaaagataactattgatgtcacacctaaaaagaaaaaagaaaaggatgtattattagcgcaatcagttgctgtcgaagaggcaaaagatgtcaaggtagaagaaaaaaatattatcgatattgaagatgacgatgatatggatgtagaaagcgcataatacgatctataaaaataagtatataaatactttttatttactgtactcttactgtgtagtggtgataccctactcgattatttttttaaaaaaatacttattctgattcttctagccatttccgtgttcgttcgaatgccacatcgacgttaaagataggggagtagttgaaatctagttctgcattgttggtacgcacctcaaatgtagtgttggatatcttcaacgtatagttgttgagtagtgatggttttctaaatagaattctcttcatatcattcttgcacgcgtacatttttagcatccatcttggaattctagatccttgttctattcccaatggtttcatcaatagaagattaaacatatcgtacgaacacgatggagagtaatcgtagcaaaagtaagcatttcctttaatctcagatcccggatactggatatattttgcagccaacacgtgcatccatgcaacatttcctacatatacccggctatgcaccgcgtcatcatcgactgtacgatacataatgttaccgtgttgcttacattgctcgtaaaagactttcgtcaatttgtctccttctccgtaaattccagtgggtcttaggcaacaagtatacaattttgctccattcatgattacggaattattggctttcataaccagttgctcggccatacgtttactttttgcgtatacatgtcctggtgatatatcataaagggtatgctcatggccgatgaatggatcaccgtgtttatttggtcctattgcttccatgctactagtatagatcaaatacttgattcctaggtccacacaagctgccaatatagtctgtgttccataatagtttactttcatgatttcattatcggtgtattttccaaatacatccactagagcagccgtatgaataatcagatttaccccatctagcgcttctctcaccttatcaaagtcgtttatatcacattgtatatagtttataaccttaactttcgaggttattggttgtggatcttctacaatatctatgactctgatttcttgaacatcatctgcactaattaacagttttactatatacctgcctagaaatccggcaccaccagtaaccgcgtacacggccattgctgccactcataatatcagactacttattctattttactaaataatggctgtttgtataatagaccacgataatatcagaggagttatttactttgaaccagtccatggaaaagataaagttttaggatcagttattggattaaaatccggaacgtatagtttgataattcatcgttacggagatattagtcaaggatgtgattccataggcagtccagaaatatttatcggtaacatctttgtaaacagatatggtgtagcatatgtttatttagatacagatgtaaatatatctacaattattggaaaggcgttatctatttcaaaaaatgatcagagattagcgtgtggagttattggtatttcttacataaatgaaaagataatacattttcttacaattaacgagaatggcgtttgatatatcagttaatgcgtctaaaacaataaatgcattagtttacttttctactcagcaaaataaattagtcatacgtaatgaagttaatgatacacactacactgtcgaatttgatagggacaaagtagttgacacgtttatttcatataatagacataatgacaccatagagataagaggggtgcttccagaggaaactaatattggttgcgcggttaatacgccggttagtatgacttacttgtataataagtatagttttaaactgattttagcagaatatataagacacagaaatactatatccggcaatatttattcggcattgatgacactagatgatttggctattaaacagtatggagacattgatctattatttaatgagaaacttaaagtagactccgattcgggactatttgactttgtcaactttgtaaaggatatgatatgttgtgattctagaatagtagtagctctatctagtctagtatctaaacattgggaattgacaaataaaaagtataggtgtatggcattagccgaacatatatctgatagtattccaatatctgagctatctagactacgatacaatctatgtaagtatctacgcggacacactgagagcatagaggataaatttgattattttgaagacgatgattcgtctacatgttctgccgtaaccgacagggaaacggatgtataattttttttatagcgtgaaggatatgataaaaaatataattgttgtatttatcccattccaatcaccttatatgattctgtaacacaatgaaggagtctcatagatgtatagaggtcagatactggtttgataaactgtttattccacatgagtatgtttgactttatggttagacccgcatactttaacaaatcactgaaaattggagttaggtattgacctctcagaatcagttgccgttctggaacattaaatgtattttttatgatatactccaacgcatttatgtgggcatacaacaagtcattactaatggagtattccaagagttttagttgtctagtatttaacaagagaagagatttcaacagactgtttatgaactcgaatgccgcctcattgtcgcttatattgatgatgtcgaattctcccaatatcatcaccgatgagtagctcatcttgttatcgggatccaagttttctaaagatgtcattaaaccctcgatcatgaatggatttatcatcatcgtttttatgttggacatgagcttagtccgtttgtccacatctatagacgacgatttctgaattattttatatatccctctctttaactccaggaacttgtcaggatggtctactttaatatgttctcgtctaagagatgaaaatctttggatggttgcacgcgacttttctctaaaggatgacgttgcccaagatcctctcttaaatgaatccatcttatccttggacaagatggacagtctattttccttagatggtttaatatttttgttacccatgatctataaaggtagacctaatcgtctcggatgacctatatatttattttcagttttattatacgcataaattgtaaaaaatatgttaggtttacaaaaatgtctcgtggggcattaatcgtttttgaaggattggacaaatctggaaaaacaacacaatgtatgaacatcatggaatctataccggcaaacacgataaaatatcttaactttcctcagagatccactgtcactggaaagatgatagatgactatctaactcgtaaaaaaacctataatgatcatatagttaatctattattttgtgcaaatagatgggagtttgcatcttttatacaagaacaactagaacagggaattactttaatagttgatagatacgcgttctctggagtagcgtatgccgccgctaaaggcgcgtcaatgactctcagtaagagttatgaatctggattgcctaaacccgacttagttatattcttggaatctggtagcaaagaaattaatagaaacgtcggcgaggaaatttatgaagatgttacattccaacaaaaggtattacaagaatataaaaaaatgattgaagaaggagatattcattggcaaattatttcttctgaattcgaggaagatgtaaagaaggagttgattaagaatatagttatagaggctatacacacggttactggaccagtggggcaactgtggatgtaatagtgaaattacattttttataaatagatgttagtacagtgttataaatggatgaagcatattactctggcaacttggaatcagtactcggatacgtgtccgatatgcataccgaactcgcatcaatatctcaattagttattgccaagatagaaactatagataatgatatattaaacaaggacattgtaaattttatcatgtgtagatcaaacttggataatccatttatctctttcctagatactgtatatactattatagatcaagagaactatcagaccgaattgattaattcattagacgacaatgaaattatcgattgtatagttaataagtttatgagcttttataaggataacctagaaaatatagtagatgctatcattactctaaaatatataatgaataatccagattttaaaactacgtatgccgaagtactcggttccagaatagccgatatagatattaaacaagtgatacgtgagaatatactacaattgtctaatgatatccgcgaacgatatttgtgaaaaatattaaaaaaaaatactttttttattaaatgacgtcgcttcgcgaatttagaaaattatgctgtgatatatatcacgcatcaggatataaagaaaaatctaaattaattagagactttataacagatagggatgataaatatttgatcattaagctattgcttcccggattagacgatagaatttataacatgaacgataaacaaattataaaattatatagtataatatttaaacaatctcaggaagatatgctacaagatttaggatacggatatataggagacactattaggactttcttcaaagagaacacagaaatccgtccacgagataaaagcattttaactttagaagacgtggatagtttcttaactacgttatcatccgtaactaaagaatcgcatcaaataaaattattgactgatatcgcatccgtttgtacatgtaatgatttaaaatgtgtagtcatgcttattgataaagatctaaaaattaaagcgggtcctcggtacgtacttaacgctattagtcctaatgcctatgatgtgtttagaaaatctaataacttgaaagagataatagaaaatgcatctaaacaaaatctagactctatatctatttctgttatgactccaattaatcccatgttagcggaatcgtgtgattctgtcaataaggcgtttaaaaaatttccatcaggaatgtttgcggaagtcaaatacgatggtgaaagagtacaagttcataaaaataataacgagtttgccttctttagtagaaacatgaaaccagtactctctcataaagtggattatctcaaagaatacataccgaaagcatttaaaaaagctacgtctatcgtattggattctgaaattgttcttgtagacgaacataatgtaccgctcccgtttggaagtttaggaatacacaaaaagaaagaatataaaaactctaacatgtgtttgttcgtgtttgactgtttgtactttgatggattcgatatgacggacattccattgtacgaacgaagatcttttctcaaagatgttatggttgaaatacccaatagaatagtattctcagagttgacgaatattagtaacgagtctcagttaactgacgtattggatgatgcactaacgagaaaattagaaggattggtcttaaaagatattaatggagtatacgaaccgggaaagagaagatggttaaaaataaagcgagactatttgaacgagggttccatggcagattctgccgatttagtagtactaggtgcttactatggtaaaggagcaaagggtggtatcatggcagtctttctaatgggttgttacgacgatgaatccggtaaatggaagacggttaccaagtgttcaggacacgatgataatacgttaagggttttgcaagaccaattaacgatggttaaaattaacaaggatcccaaaaaaattccagagtggttggtagttaataaaatctatattcccgattttgtagtagaggatccgaaacaatctcagatatgggaaatttcaggagcagagtttacatcttccaagtcccataccgcaaatggaatatccattagatttcctagatttactaggattagagaagataaaacgtggaaagaatctactcatctaaacgatttagtaaacttgactaaatcttaatagttacatacaaactgaaaattaaaataacactatttagttggtggtcgccatggatggtgttattgtatactgtctaaacgcgttagtaaaacatggcgaggaaataaatcatataaaaaatgatttcatgattaaaccatgttgtgaaagagtttgtgaaaaagtcaagaacgttcacattggcggacaatctaaaaacaatacagtgattgcagatttgccatatatggataatgcggtatccgatgtatgcaattcactgtataaaaagaatgtatcaagaatatccagatttgctaatttgataaagatagatgacgatgacaagactcctactggtgtatataattattttaaacctaaagatgttattcctgttatcatatctataggaaaggataaagatgtctgtgaactattaatctcatcagacatatcgtgtgcatgcgtggagttaaattcatatcacgtagccattcttcccatggatgtttccttttttaccaaaggaaatgcatcattgattattctcctgtttgatttctctatcgatgcagcacctctcttaagaagtgtaaccgataataatgttattatatctagacaccagcgtctacatgacgagcttccgagttccaattggttcaagttttacataagtataaagtccgactattgttctatattatatatggttgttgatggatctgtgatgcatgcgatagctgataatagaactcacgcaattattagcaaaaatatattagacaatactacgattaacgatgagtgtagatgctgttattttgaaccacagattaggattcttgatagagatgagatgctcaatggatcatcgtgtgatatgaacagacattgtattatgatgaatttacctgatgtaggcaaatttggatctagtatgttggggaaatatgaacctgacatgattaagattgctctttcggtggctggtaatttaataagaaatcgagactacattcccgggagacgaggatatagctactacgtttacggtatagcctctagataatttttttaagcacgaaataaaaaacataattttaaaccaatctatttcatactattttgtgtgatcaccatggacataaagatagatattagtatttctggtgataaatttacggtgactactaggagggaaaatgaagaaagaaaaaaatatctacctctccaaaaagaaaaaactactgatgttatcaaacctgattatcttgagtacgatgacttgttagatagagatgagatgtttactattctagaggaatattttatgtacagaggtctattaggcctcagaataaaatatggacgactctttaacgaaattaaaaaattcgacaatgatgcggaagaacaattcggtactatagaagaactcaagcagaaacttagattaaattctgaagagggagcagataactttatagattatataaaggtacaaaaacaggatatcgtcaaacttactgtatacgattgcatatctatgataggattgtgtgcatgcgtggtagatgtttggagaaatgagaaactgttttctagatggaaatattgtttacgagctattaaactgtttattaatgatcacatgcttgataagataaaatctatactgcagaatagactagtatatgtggaaatgtcatagaaagttaaaagttaatgagagcaaaaatatataaggttgtattccatatttgttattttttctgtaatagttagaaaaatacattcgatggtctatctaccagattattatgtgttataaggtactttttctcataataaactagagtatgagtaagatagtgtttttcaaaacatataaatctaaaattgatggatgagatatacagctattaatttcgaaaatatattttaatctgataactttaaacatggatttttgatggtggtttaacgttttaaaaaaagattttgttattgtagtatatgataatattaaaagatggatataaagaatttgctgactgcatgtactattttttacattactacattggctacggcagatatacctactccgccaccaacgggtcatgtgacaagggagaatatcttgataagaggcataatcaatgttgtaatcggtgtccacctggagaatttgccaaggttagatgtaatggtaacgataacacaaaatgtgaacgctgcccacctcatacatataccacaatcccaattattctaatggatgtcatcaatgtagaaaatgcccaaccggatcatttgataaggtaaagtgtaccggaacacagaacagtaaatgttcgtgtcttcctggttggtattgtgctactgattcttcacagactgaagattgttgaaattgtgtaccaaaaaggagatgtccatgcggatactttggtggaatagatgaacaaggaaatcctatttgtaaatcgtgttgtgttggtgaatattgcgactacctacgtaattatagacttgatccatttcctccatgcaaactatctaaatgtaattaattatgattttgatgataatgttaccatacattatatcgctacttggttagtgtattattcagtatgaagacctattaataattacttatcttttgacgatcttgttataattataatataaaaatacttatggcatagtaactcataattgctgacgcgataaattcgtaataatctgttttgttcaaatttttataaggaatctacaggcataaaaataaaaatataatttataatatactcttacagcgcgccatcatgaataacagcagtgaattgattgctgttattaatggatttagaaatagtggacgattttgtgatattagtatagttattaatgatgaaaggataaacgctcataaactcatcctatctggagcctccgaatatttttccattctgttttccaataattttatcgattctaatgaatacgaagttaatctaagtcatttagattatcaaagcgttaacgatttgatcgattacatttatgggatacctttgagcctaactaacgataacgtgaaatatattctttcaaccgctgattttttacaaattggatctgctattacggagtgtgaaaattacatacttaaaaatctttgttctaaaaactgtatcgatttctacatatacgctgataaatataataacaagaaaatagaatcagcgtcgtttaacacaatattacaaaatattttgagactcatcaacgatgaaaactttaaatacttaacagaggaatcaatgataaaaattttaagcgatgatatgttaaatataaaaaatgaggattttgcaccactaattctcattaaatggttagagagtactcaacaatcatgcaccgtcgagttacttagatgcctcagaatatcattgctttccccacaagttataaaatcactttatagtcatcaactggttagttcaatctacgaatgtataacattcttaaacaatatagcattcttggatgaatcatttcctagataccatagcatcgagttgatatctatcggtataagtaattcgcatgataagatttccataaactgctacaatcataaaaaaaatacatgggaaatgatatcttcacgtagatataggtgtagtttcgcagtggccgtcctggataatattatctatatgatgggtggatatgatcagtccccgtatagaagttcaaaggttatagcgtacaatacatgtacaaattcttggatatatgatataccagagctaaaatatcctcgttctaattgtgggggactggctgatgacgaatacatttattgtataggcggcatacgcgatcaggattcatcgttgacatctagtattgataaatggaagccatcaaaaccatattggcagaagtatgctaaaatgcgcgaaccaaaatgtgatatgggggttgcgatgttaaacggattaatatatgtcatgggtggaatcgttaaaggtgacacgtgtaccgacgcactagagagtttatcagaagatggatggatgaagcatcaacgtcttccaataaaaatgtccaatatgtcgacgattgttcatgatggcaagatttatatatctggaggttacaacaatagtagtgtagttaatgtaatatcgaatctagtccttagctataatccgatatatgatgaatggaccaaattatcatcattaaacattcctagaattaatcccgctctatggtcagcgcataataaattatatgtaggaggaggaatatctgatgatgttcgaactaatacatctgaaacatacgataaagaaaaagattgttggacattggataatggtcacgtgttaccacgcaattatataatgtataaatgcgaaccgattaaacataaatatccattggaaaaaacacagtacacgaatgattttctaaagtatttggaaagttttataggtagttgatagaacaaaatacataattttgtaaaaataaatcactttttatactaatatgacacgattaccaatacttttgttactaatatcattagtatacgctacaccttttcctcagacatctaaaaaaataggtgatgatgcaactctatcatgtaatcgaaataatacaaatgactacgttgttatgagtgcttggtataaggagcccaattccattattcttttagctgctaaaagcgacgtcttgtattttgataattataccaaggataaaatatcttacgactctccatacgatgatctagttacaactatcacaattaaatcattgactgctagagatgccggtacttatgtatgtgcattctttatgacatcaactacaaatgacactgataaagtagattatgaagaatactccacagagttgattgtaaatacagatagtgaatcgactatagacataatactatctggatctacacattcaccggaaactagttctaagaaacctgattatatagataattctaattgctcgtcggtattcgaaatcgcgactccggaaccaattactgataatgtagaagatcatacagacaccgtcacatacactagtgatagcattaatacagtaagtgcatcatctggagaatccacaacagacgagactccggaaccaattactgataaagaagatcatacagttacagacactgtctcatacactacagtaagtacatcatctggaattgtcactactaaatcaaccaccgatgatgcggatctttatgatacgtacaatgataatgatacagtaccaccaactactgtaggcggtagtacaacctctattagcaattataaaaccaaggactttgtagaaatatttggtattaccgcattaattatattgtcggccgtggcaattttctgtattacatattatatatataataaacgttcacgtaaatacaaaacagagaacaaagtctagatttttgacttacataaatgtctgggatagtaaaatctatcatattgagcggaccatctggtttaggaaagacagccatagccaaaagactatgggaatatatttggatttgtggtgtcccataccactagatttcctcgtcctatggaacgagaaggtgttgattaccattacgttaacagagaggccatctggaagggaatagccgccggaaactttctagaacatactgagtttttaggaaatatttacggaacttctaaaacagctgtgaatacagcggctattaataatcgtatttgtgtgatggatctaaacatcgacggtgttagaagtcttaaaaatacgtacctaatgccttactcggtgtatataagacctacctctcttaaaatggttgagaccaagcttcgttgtagaaacactgaagctaacgatgagattcatcgtcgcgtgatattggcaaaaacggatatggatgaggccaacgaagcaggtctattcgacactattatcattgaagatgatgtgaatttagcatatagtaagttaattcagatactacaggaccgtattagaatgtattttaacactaattagagacttaagacttaaaacttgataattaataatataactcgtttttatatgtggctatttcaacgtctaatgtattagttaaatattaaaacttaccacgtaaaacttaaaatttaaaatgatatttcattgacagatagatcacacattatgaactttcaaggacttgtgttaactgacaattgcaaaaatcaatgggtcgttggaccattaataggaaaaggtggattcggtagtatttatactactaatgacaataattatgtagtaaaaatagagcccaaagctaacggatcattatttaccgaacaggcattttatactagagtacttaaaccatccgttatcgaagaatggaaaaaatctcacaatataaagcacgtaggtcttatcacgtgcaaggcatttggtctatacaaatccattaatgtggaatatcgattcttggtaattaatagattaggtgcagatctagatgcggtgatcagagccaataataatagattaccaaaaaggtcggtgatgttgatcggaatcgaaatcttaaataccatacaatttatgcacgagcaaggatattctcacggagatattaaagcgagtaatatagtcttggatcaaatagataagaataaattatatctagtggattacggattggtttctaaattcatgtctaatggagaacatgttccatttataagaaatccaaataaaatggataacggtactctagaatttacacctatagattcgcataaaggatacgttgtatctagacgtggagatctagaaacacttggatattgtatgattagatggttgggaggtatcttgccatggactaagatatctgaaacaaagaattgtgcattagtaagtgccacaaaacagaaatatgttaacaatactgcgactttgttaatgaccagtttgcaatatgcacctagagaattgctgcaatatattaccatggtaaactctttgacatattttgaggaacccaattatgacgagtttcggcacatattaatgcagggtgtatattattaagtgtggtgtttggtcgatgtaaaatttttgtcgataaaaattaaaaaataacttaatttattattgatctcgtgtgtacaaccgaaatcatggcgatgttttacgcacacgctctcggtgggtacgacgagaatcttcatgcctttcctggaatatcatcgactgttgccaatgatgtcaggaaatattctgttgtgtcagtttataataacaagtatgacattgtaaaagacaaatatatgtggtgttacagtcaggtgaacaagagatatattggagcactgctgcctatgtttgagtgcaatgaatatctacaaattggagatccgatccatgatcaagaaggaaatcaaatctctatcatcacatatcgccacaaaaactactatgctctaagcggaatcgggtacgagagtctagacttgtgtttggaaggagtagggattcatcatcacgtacttgaaacaggaaacgctgtatatggaaaagttcaacatgattattctactatcaaagagaaggccaaagaaatgaatgcacttagtccaggacctatcattgattaccacgtctggataggagattgtatctgtcaagttactgctgtggacgtacatggaaaggaaattatgagaatgagattcaaaaagggtgcggtgcttccgatcccaaatctggtaaaagttaaacttggggagaatgatacagaaaatctttcttctactatatcggcggcaccatcgaggtaaccacctctctggaagacagcgtgaataatgtactcatgaaacgtttggaaactatacgccatatgtggtctgtcgtatatgatcattttgatattgtgaatggtaaagaatgctgttatgtgcatacgcatttgtctaatcaaaatcttataccgagtactgtaaaaacaaatttgtacatgaagactatgggatcatgcattcaaatggattccatggaagctctagagtatcttagcgaactgaaggaatcaggtggatggagtcccagaccagaaatgcaggaatttgaatatccagatggagtggaagacactgaatcaattgagagattggtagaggagttcttcaatagatcagaacttcaggctggtgaatcagtcaaatttggtaattctattaatgttaaacatacatctgtttcagctaagcaactaagaacacgtatacggcagcagcttcctttatactctcatcttttaccaacacaaagggtggatatttgttcattggagttgataataatacacacaaagtaattggattcacggtgggtcatgactacctcagactggtagagaatgatatagaaaagcatatcaaaagacttcgtgttgtgcatttctgtgagaagaaagaggacatcaagtacacgtgtcgattcatcaaggtatataaacctggggatgaggctacctcgacatacgtgtgcgctatcaaagtggaaagatgctgttgtgctgtgtttgcagattggccagaatcatggtatatggatactaatggtatcaagaagtattctccagatgaatgggtgtcacatataaaattttaattaatgtaatagagaacaaataataaggttgtaatatcatatagacaataactaacaattaattagtaactgttatctcttttttaactaaccaactaactatatacctattaatacatcgtaattatagttcttaacatctattaatcattaattcgcttctttaattttttataaactaacattgttaattgaaaagggataacatgttacagaatataaattatatatggatttttttaaaaaggaaatacttgactggagtatatatttatctcttcattatatagcacgcgtgttttccaatttttccacatcccatataatacaggattataatctcgttcgaacatacgagaaagtggataaaacaatagttgattttttatctaggttgccaaatttattccatattttagaatatggggaaaatattctacatatttattctatggatgatgctaatacgaatattataattttttttctagatagagtattaaatattaataagaacgggtcatttatacacaatctcaggttatcatcatccattaatataaaagaatatgtatatcaattagttaataatgatcatccagataataggataagactaatgcttgaaaatggacgtagaacaagacattttttgtcctatatatcagatacagttaatatctatatatgtattttaataaatcatggattttatatagatgccgaagacagttacggttgtacattattacatagatgtatatatcactataagaaatcagaatcagaatcatacaatgaattaattaagatattgttaaataatggatcagatgtagataaaaaagatacgtacggaaacacaccttttatcctattatgtaaacacgatatcaacaacgtggaattgtttgagatatgtttagagaatgctaatatagactctgtagactttaatagatatacacctcttcattatgtctcatgtcgtaataaatatgattttgtaaagttattaatttctaaaggagcaaatgttaatgcgcgtaatagattcggaactactccattttattgtggaattatacacggtatctcgcttataaaactatatttggaatcagacacagagttagaaatagataatgaacatatagttcgtcatttaataatttttgatgctgttgaatctttagattatctattatccagaggagttattgatattaactatcgtactatatacaacgaaacatctatttacgacgctgtcagttataatgcgtataatacgttggtctatctattaaacagaaatggtgattttgagacgattactactagtggatgtacatgtatttcggaagcagtcgcaaacaacaacaaaataataatggaagtactattgtctaaacgaccatctttgaaaattatgatacagtctatgatagcaattactaaacataaacagcataatgcagatttattgaaaatgtgtataaaatatactgcgtgtatgaccgattatgatactcttatagatgtacagtcgctacagcaatataaatggtatattttaaaatgtttcgatgaaatagatatcatgaagagatgttatataaaaaataaaactgtattccaattagttttttgtatcaaagacattaatactttaatgagatacggtaaacatccttctttcgtgaaatgcactagtctcgacgtatacggaagtcgtgtacgtaatatcatagcatctattagatatcgtcagagattaattagtctattatccaagaagctggatcctggagataaatggtcgtgttttcctaacgaaataaaatataaaatattggaaaactttaacgataacgaactatccacatatctaaaaatcttataaacactattaaaatataaaatctaagtaggataaaatcacactacatcattgtttccttttagtgctcgacagtgtatactatttttaacactcataaataaaaatgaaaacgatttccgttgttacgttgttatgcgtactacctgctgttgtttattcaacatgtactgtacccactatgaataacgctaaattaacgtctaccgaaacatcgtttaatgataaacagaaagttacgtttacatgtgatcagggatatcattcttcggatccaaatgctgtctgcgaaacagataaatggaaatacgaaaatccatgcaaaaaaatgtgcacagtttctgattacatctctgaattatataataaaccgctatacgaagtgaattccaccatgacactaagttgcaacggcgaaacaaaatattttcgttgcgaagaaaaaaatggaaatacttcttggaatgatactgttacgtgtcctaatgcggaatgtcaacctcttcaattagaacacggatcgtgtcaaccagttaaagaaaaatactcatttggggaatatatgactatcaactgtgatgttggatatgaggttattggtgcttcgtacataagttgtacagctaattcttggaatgttattccatcatgtcaacaaaaatgtgatatgccgtctctatctaatggattaatttccggatctacattttctatcggtggcgttatacatcttagttgtaaaagtggttttacactaacggggtctccatcatccacatgtatcgacggtaaatggaatcccgtactcccaatatgtgtacgaactaacgaagaatttgatccagtggatgatggtcccgacgatgagacagatttgagcaaactctcgaaagacgttgtacaatatgaacaagaaatagaatcgttagaagcaacttatcatataatcatagtggcgttaacaattatgggcgtcatatttttaatctccgttatagtattagtttgttcctgtgacaaaaataatgaccaatataagttccataaattgctaccgtaaatataaatccgttaaaataatgaataattaataacgaacaagtatcaaaagattaaagaattatagctagaatcaattgagatgtcttcttcagtggatgttgatatctacgatgccgttagagcatttttactcaggcactattataacaagagatttattgtgtatggaagaagtaacgccatattacataatatatacaggctatttacaagatgcgccgttataccgttcgatgatatagtacgtactatgccaaatgaatcacgtgttaaacaatgggtgatggatacacttaatggtataatgatgaatgaacgcgatgtttctgtaagcgttggcaccggaatactattcatggaaatgtttttcgattacaataaaaatagtatcaacaatcaactaatgtatgatataattaatagcgtatctataattctagctaatgagagatatagaagcgcttttaacgacgatggtatatacatccgtagaaatatgattaacaagttgtacggatacgcatctctaactactattggcacgatcgctggaggtgtttgttattatctgttgatgcatctagttagtttgtataaataattatttcaatatactagttaaaattttaagattttaaatgtataaaaaactaataacgtttttatttgtaataggtgcattagcatcctattcgaataatgagtacactccgtttaataaactgagtgtaaaactctatatagatggagtagataatatagaaaattcatatactgatgataataatgaattggtgttaaattttaaagagtacacaatttctattattacagagtcatgcgacgtcggatttgattccatagatatagatgttataaacgactataaaattattgatatgtataccattgactcgtctactattcaacgcagaggtcacacgtgtagaatatctaccaaattatcatgccattatgataagtacccttatattcacaaatatgatggtgatgagcgacaatattctattactgcagagggaaaatgctataaaggaataaaatatgaaataagtatgatcaacgatgatactctattgagaaaacatactcttaaaattggatctacttatatatttgatcgtcatggacatagtaatacatattattcaaaatatgatttttaaaaatttaaaatatattatcacttcagtgacagtagtcaaataacaaacaacaccatgagatatattataattctcgcagttttgttcattaatagtatacacgctaaaataactagttataagtttgaatccgtcaattttgattccaaaattgaatggactggggatggtctatacaatatatcccttaaaaattatggcatcaagacgtggcaaacaatgtatacaaatgtaccagaaggaacatacgacatatccgcatttccaaagaatgatttcgtatctttctgggttaaatttgaacaaggcgattataaagtggaagagtattgtacgggactatgcgtcgaagtaaaaattggaccaccgactgtaacattgactgaatacgacgaccatatcaatttgtacatcgagcatccgtatgctactagaggtagcaaaaagattcctatttacaaacgcggtgacatgtgtgatatctacttgttgtatacggctaacttcacattcggagattctaaagaaccagtaccatatgatatcgatgactacgattgcacgtctacaggttgcagcatagactttgtcacaacagaaaaagtgtgcgtgacagcacagggagccacagaagggtttctcgaaaaaattactccatggagttcgaaagtatgtctgacacctaaaaagagtgtatatacatgcgcaattagatccaaagaagatgttcccaatttcaaggacaaaatggccagagttatcaagagaaaatttaataaacagtctcaatcttatttaactaaatttctcggtagcacatcaaatgatgttaccacttttcttagcatgcttaacttgactaaatattcataactaatttttattaatgatacaaaaacgaaataaaactgcatattatacactggttaacgcccttataggctctaaccattttcaagatgaggtccctgattatagtccttctgttcccctctatcatctactccatgtctattagacaatgtgagaagactgaagaggaaacatggggattgaaaatagggttgtgtataattgccaaagatttctatcccgaaagaactgattgcagtgttcatctcccaactgcaagtgaaggattgataactgaaggcaatggattcagggatatacgaaacaccgataaattataaaaaaagcaatgtgtccgctgtttccgttaataatactattttcgtaactggcggattattcataaataactctaatagcacgatcgtggttaacaatatggaaaaacttgacatttataaagacaaacaatggtcgattatagaaatgcctatggctagggtatatcacggcatcgactcgacatttggaatgttatattttgccggaggtctatccgttaccgaacaatatggtaatttagagaaaaacaacgagatatcttgttacaatcctagaacgaataagtggtttgatatttcatatactatttataagatatccatatcatcattgtgtaaactaaataacgtcttctatgtatttagtaaggacattggatatgtggaaaagtatgatggtgcatggaagttagtacatgatcgtctccccgctataaaggcattatcaacttctccttattgattgaaaatgaaaatataaatagtttttatgtatagcagtattaccctatagttttattgcttactactaacatggatacagatgttacaaatgtagaagatatcataaatgaaatagatagagagaaagaagaaatactaaaaaatgtagaaattgaaaataataaaaacattaacaagaatcatccaagtggatatattagagaagcactcgttattaataccagtagtaatagtgattccattgataaagaagttatagaatgtatctgtcacgatgtaggaatatagatcatatctactaatttttataatcgatacaaaacataaaaaacaactcgttattacatagcaggcatggaatccttcaagtattgttttgataacgatggcaagaaatggattatcggaaatactttatattctggtaattcaatactatataaggtcagaaaaaatttcactagttcgttctacaattacgtaatgaagatagatcacaaatcacacaagccattgttgtctgaaatacgattctatatatctgtattggatcctttgactatcgacaactggacacgggaacgtggtataaagtatttggctattccagatctgtatggaattggagaaaccgatgattatatgttcttcgttataaagaatttgggaagagtattcgccccaaaggatactgaatcagtcttcgaagcatgcgtcactatgataaacacgttagagtttatacactctcaaggatttacccatggaaaaatagaaccgaggaatatactgattagaaataaacgtctttcactaattgactattctagaactaacaaactatacaagagtggaaactcacatatagattacaacgaggacatgataacttcaggaaatatcaattatatgtgtgtagacaatcatcttggagcaacagtttcaagacgaggagatttagaaatgttgggatattgcatgatagaatggttcggtggcaaacttccatggaaaaacgaaagtagtataaaagtaataaaacaaaaaaaagaatataaaaaatttatagctactttctttgaggactgttttcctgaaggaaatgaacctctggaattagttagatatatagaattagtatacacgttagattattctcaaactcctaattatgacagactacgtaaactgtttatacaagattgaaattatattcttttttttatagagtgtggtagtgttacggatatttaatattagactatctctatcgcgctacacgaccaatatcgattactatggatatcttcagggaaatcgcatcttctatgaaaggagagaatgtattcatttctccagcgtcaatctcgtcagtattgacaatactgtattatggagctaatggatccactgctgaacagctatcaaaatatgtagaaaaggaggagaacatggataaggttagcgctcaaaatatctcattcaaatccataaataaagtatatgggcgatattctgccgtgtttaaagattcctttttgagaaaaattggcgataagtttcaaactgttgacttcactgattgtcgcactatagatgcaatcaacaagtgtgtagatatctttactgaggggaaaatcaatccactattggatgaaccattgtctcctgatacctgtctcctagcaattagtgccgtatactttaaagcaaaatggttgacgccattcgaaaaggaatttaccagtgattatcccttttacgtatctccgacggaaatggtagatgtaagtatgatgtctatgtacggcaaggcatttaatcacgcatctgtaaaggaatcattcggcaacttttcaatcatagaactgccatatgttggagatactagtatgatggtcattcttccagacaagattgatggattagaatccatagaacaaaatctaacagatacaaattttaagaaatggtgtaactctctggaagctacgtttatcgatgttcacattcccaagtttaaggtaacaggctcgtataatctggtggatactctagtaaagtcaggactgacagaggtgttcggttcaactggagattatagcaatatgtgtaattcagatgtgagtgtcgacgctatgatccacaaaacgtatatagatgtcaatgaagagtatacagaagcagctgcagcaacttgtgcactggtgtcagactgtgcatcaacaattacaaatgagttctgtgtagatcatccgttcatctatgtgattaggcatgttgatggaaaaattcttttcgttggtagatattgctctccgacaactaattgttaaccattttttttaaaaaatagaaaaaacatgtggtattagtgcaggtcgttattcttccaattgcaattggtaagatgacggccaactttagtacccacgtcttttcaccacagcactgtggatgtgacagactgaccagtattgatgacgtcagacaatgtttgactgaatatatttattggtcgtcctatgcataccgcaacaggcaatgcgctggacaattgtattccacactcctctcttttagagatgatgcggaattagtgttcatcgacattcgcgagctggtaaaaaatatgccgtgggatgatgtcaaagattgtgcagaaatcatccgttgttatataccggatgagcaaaaaaccatcagagagatttcggccatcatcggactttgtgcatatgctgctacttactggggaggtgaagaccatcccactagtaacagtctgaacgcattgtttgtgatgcttgagatgctcaattacgtggattataacatcatattccggcgtatgaattgatgagttgtacatcttgacattttcttctttcttctcttctccctttcccagaaacaaactttttttacccactataaaataaaatgagtatactacctgttatatttctttctatatttttttattcttcattcgttcagacttttaacgcgcctgaatgtatcgacaaagggcaatattttgcatcattcatggagttagaaaacgagccagtaatcttaccatgtcctcaaataaatacgctatcatccggatataatatattagatattttatgggaaaaacgaggagcggataatgatagaattataccgatagataatggtagcaatatgctaattctgaacccgacacaatcagactctggtatttatatatgcattaccacgaacgaaacctactgtgacatgatgtcgttaaatttgacaatcgtgtctgtctcagaatcaaatatagatcttatctcgtatccacaaatagtaaatgagagatctactggcgaaatggtatgtcccaatattaatgcatttattgctagtaacgtaaacgcagatattatatggagcgggcatcgacgccttagaaataagagacttaaacaacggacacctggaattattaccatagaagatgttagaaaaaatgatgctggttattatacatgtgttttagaatatatatacggtggcaaaacatataacgtaaccagaattgtaaaattagaggtacgggataaaataataccttctactatgcaattaccagatggcattgtaacttcaataggtagtaatttgactattgcatgcagagtatcgttgagacctcccacaacggatgcagacgtcttttggataagtaatggtatgtattacgaagaagatgatggggacggaaacggtagaataagtgtagcaaataaaatctatatgaccgataagagacgtgttattacatcccggttaaacattaatcctgtcaaggaagaagatgctacaacgtttacgtgtatggcgtttactattcctagcatcagtaaaacagttactgttagtataacgtgaatgtatgttgttacatttccatgtcaattgagtttataagaatttttatacattatcttccaacaagcaattgacgaacgtattgctatgattaactcccacgatactatgcatattattaatcattaacttgcagactatacctagagctattttgacatactcgtgttcttgtgtaattgcagtatctatattattaaagtacgtaaatctagctatagttttattatttaattttagataatataccgtctccttatttttaaaaattgccacatcctttattaaatcatgaatgggaatttctatgtcatagttaatatattgtgaacaacaagagcagatatctataggaaagggtggaatgcgatacattgatctatgtagttttaaaacacacgcaaactttgaagaatttatataaatcattccatcgatacatccttctatgttgagatgtatatatccaggaattcgtttattaatatcgggaaatgtataaactaaaacattgcccggaagcggagcttctaccggagttatatcagtttttaacttacaaaatgtaaccaatacctttgcatgacttgttttgttcggcaacgttagtttaaacttgacgaatggattaattacaatagcatgatccgcgcatctattaagtttttttactttaacgcccttgtatgtttttacagagactttatctaaatttctagtgcttgtatgtgttataaatataacgggatatagaactgaatcacctaccttagatacccaattacattttatcagatccagataataaacaaattttgtcgccctaactaattctatattgttatatattttacaattggttatgatatcatgtaataacttggaatctaacgcacatcgtcgtacgtttatacaattgtgatttagtgtagtatatctacacatgtatttttccgcgctatagtattctggactagtgataaaactatcgttatatctgtcttcaatgaactcatcgagatattgctctctgtcatattcatacacctgcataaactttctagacatcttacaatccgtgttattttaggatcatatttacatatttacgggtatatcaaagatgttagattagttaatgggaatcgtctataataatgaatattaaacaattatatgaggacttttaccacaaagcatcataaaaatgagtcgtcgtctgatttatgttttaaatatcaaccgcgaatcaactcataaaatacaagagaatgaaatatatacatattttagtcattgcaatatagaccatacttctacagaacttgattttgtagttaaaaactatgatctaaacagacgacaacctgtaactgggtatactgcactacactgctatttgtataataattactttacaaacgatgtactgaagatattattaaatcatggagtggatgtaacgatgaaaaccagtagcggacgtatgcctgtttatatattgcttactagatgttgcaatatttcacatgatgtagtgatagatatgatagacaaagataaaaaccacttattacatagagactattccaacctattactagagtatataaaatctcgttacatgttattaaaggaagaggatatcgatgagaacatagtatccactttattagataagggaatcgatcctaactttaaacaagacggatatacagcgttacattattattatttgtgtctcgcacacgtttataaaccaggtgagtgtagaaaaccgataacgataaaaaaggccaagcgaattatttctttgtttatacaacatggagctaatctaaacgcgttagataattgtggtaatacaccattccatttgtatcttagtattgaaatgtgtaataatattcatatgactaaaatgctgttgacttttaatccgaatttcgaaatatgtaataatcatggattaacgcctatactatgttatataacttccgactacatacaacacgatattcttgttatgttaatacatcactatgaaacaaatgttggagaaatgccgatagatgagcgtcgtataatcgtattcgagtttatcaaaacatattctacacgtcctgcagattcgataacttatttgatgaataggtttaaaaatatagatatttatacccgctatgaaggaaagacattattacacgtagcatgtgaatataataatacacacgtaatagattatcttatacgtatcaacggagatataaatgcgttaaccgacaataacaaacacgctacacaactcattatagataacaaagaaaattccccatataccattaattgtttactgtatatacttagatatattgtagataagaatgtgataagatcgttggtggatcaacttccatctctacctatcttcgatataaaatcatttgagaaattcatatcctactgtatacttttagatgacacattttacaatagacacgttaggaatcgcgattctaaaacgtatcgatacgcattttcaaaatacatgtcgtttgataaatacgatggtataataactaaatgtcataaagaaacaatattgctcaaactatccactgttctagacactacactatatgcagttttaagatgccataattcgaaaaagttaagaagatacctcaccgagttaaaaaaatataataacgataagtcctttaaaatatattctaatattatgaatgagagataccttaatgtatattataaagatatgtacgtgtcaaaggtatatgataaactatttcctgttttcacagataaaaattgtctactaacattactaccttcagaaattatatacgaaatattatacatgctgacaattaacgatctttataatatatcgtatccacctaccaaagtatagttgtatttttctcatgcgatgtgtgtaaaaaaactgatattatataaatattttagtgccgtataataaagatgacgatgaaaatgatggtacatatatatttcgtatcattattgttattgctattccacagttacgccatagacatcgaaaatgaaatcacagaattcttcaataaaatgagagatactctaccagctaaagactctaaatggttgaatccagcatgtatgttcggaggcacaatgaatgatatagccgctctaggagagccattcagcgcaaagtgtcctcctattgaagacagtcttttatcgcacagatataaagactatgtggttaaatgggaaaggctagaaaaaaatagacggcgacaggtttctaataaacgtgttaaacatggtgatttatggatagccaactatacatctaaattcagtaaccgtaggtatttgtgcaccgtaactacaaagaatggtgactgtgttcagggtatagttagatctcatattagaaaacctccttcatgcattccaaaaacatatgaactaggtactcatgataagtatggcatagacttatactgtggaattctttacgcaaaacattataataatataacttggtataaagataataaggaaattaatatcgacgacattaagtattcacaaacgggaaaggaattaattattcataatccagagttagaagatagcggaagatacgactgttacgttcattacgacgacgttagaatcaagaatgatatcgtagtatcaagatgtaaaatacttacggttataccgtcacaagaccacaggtttaaactaatactagatccaaaaatcaacgtaacgataggagaacctgccaatataacatgcactgctgtgtcaacgtcattattgattgacgatgtactgattgaatgggaaaatccatccggatggcttataggattcgattttgatgtatactctgttttaactagtagaggcggtattaccgaggcgaccttgtactttgaaaatgttactgaagaatatataggtaatacatataaatgtcgtggacacaactattattttgaaaaaacccttacaactacagtagtattggagtaaatatacaatgcatttttatatacattactgaataattattattattatttatatcgtatttgtgctataacgcgactatctaggtatttgtatctcaccgatagagaacatataaatgtagactctattaaacagttgtgtaaaatatcagatcctaatgcatgttatagatgtggatgtacggctttacatgagtacttttataattatagatcagtcaacggaaaatacaagtatagatacaacggttactatcaatattatttatctagcgattatgaaaattataatgaatattattatgatgattatgatagaactggtatgaacagtgagagtgataatatatcaatcaaaacagaatatgaattctatgatgaaacacaagatcaaagtacacaactagtaggttacgacattaaactcaaaaccaatgaggatgattttatggctatgatagatcagtgggtgtccatgattatatagatgaatcaattaataaagtagtatatggaagagagtctcacgtaagatggcgggatatatggcaagaacataatgatggcgtatacagtataggaaaggagtgcatagataatatatacgaagacaaccataccgtagacgaattctacaagatagacagcgtatcagatgtagatgacgcggaacacatatctccgataactaatgatgtatctacacaaacatgggaaaagaaatcagagttagatagatacatggaaatgtatcctcgtcatagatatagtaagcattctgtctttaagggattttctgacaaagttagaaaaaatgatttagacatgaatgtggtaaaagaattactttctaacggtgcatctctaacaattaaggatagcagtaataaggatccaataaccgtttattttcgaagaacgataatgaatttagaaatgattgatgaacgaaagtatatagtacactcctatctaaaaaattataaaaatttcgattatccatttttcaggaagttagttttgactaataaacattgtctcaacaattattataatataagcgacagcaaatatggaacaccgctacatatattggcgtctaataaaaaattaataactcctaattacatgaagttattagtgtataacggaaatgatataaacgcacgaggtgaagatacacaaatgcgaactccattacacaaatatttgtgtaaatttgtatatcataatattgaatatggtatccgatactataatgaaaagattatagacgcatttatagagttaggagccgatctaactattccaaatgacgatggaatgataccagtagtttactgtatacactcaaatgccgaatatggttataacaatattactaacataaagataatacgtaaactacttaatcttagtagacgtgcgtcacataatctatttagagatcgagtcatgcacgattatataagtaatacatatattgatcttgagtgtttagatattattagatcgttggatggattcgatatcaatggttactttgaaggacgtacaccacttcattgcgctatacaacataacttcactcagattgctaagtacttattagatcgaggagctgatatagtcgtacccaacacattgattatacatcagtacatacagtaaatagcatagatatggaggaggatacaaatatttcaaataaagttataaggtacaacactgtcaataatatatgggaaacattacctaacttctggactggaactataaatccaggcgtggtctcgcataaagatgatatatatgttgtatgcgacatcaaagatgaaaaaaatgttaaaacttgtatatttagatataacacgaatacgtataacggatgggaattggtcacgacgacagaaagcagattatcagctctgcatactattctttataacaataccataatgatgttacattgttatgaatcgtatatgttacaagatacatttaatgtgtacactcgcgaatggaatcatatgtgtcatcaacattcgaatagttatatcatgtacaatatactacccatctactaaatataatagaataaaataaatgagtatgatcattttagataacgattgattttatcattaccgcttcattcttatattctttgcttacggaacctatatttagaaacatctactaacgattttttatgcttgcattattaatggtatgtaatatgattgattgtgtacgcaataccaatttgttaagtatgaatacggggtacaaacataaactgaagtttaacattatttatttatgatatatatcgttattgtttggtctataccatggatatctttaaagaactaatcttaaaacacacggatgaaaatgttttgatttctccagtttctattttatctactttatctattctaaatcatggagcagctggttctacagctgaacaactatcaaaatatatagagaatatgaatgagaatacacccgatgacaataatgacatggacgtagatattccgtattgtgcgacactagctaccgcaaataaaatatacggtagcgatagtatcgagttccacgcctccttcctacaaaaaataaaagacgattttcaaactgtaaactttaataatgctaaccaaacaaaggaactaatcaacgaatgggttaagacaatgacaaatggtaaaattaattccttattgactagtccgctatccattaatactcgtatgacagttgttagcgccgtccattttaaagcaatgtggaaatatccattttctaaacatcttacatatacagacaagttttatatttctaagaatatagttaccagtgttgatatgatggtgagcactgagaataacttgcaatatgtacatattaatgaattattcggaggattctctattatcgatattccatacgagggaaactctagtatggtaattatactaccggacgacatagaaggtatatataacatagaaaaaaatataacagatgaaaaatttaaaaaatggtgtggtatgttatctactaaaagtatagacttgtatatgccaaagtttaaagtggaaatgacagaaccgtataatctggtaccgattttagaaaatttaggacttactaatatattcggatattatgcagattttagcaagatgtgtaatgaaactatcactgtagaaaaatttctacatacgacgtttatagatgttaatgaggagtatacagaagcatcggccgttacaggagtatttatgactaacttttcgatggtatatcgtacgaaggtctacataaaccatccattcatgtacatgattaaagacaacacaggacgtatactttttatagggaaatactgctatccgcaataaatataaacaaatagacttttatcacgtttatctatgtctaaatattacaaatagtaatagtataaactaaagctgataatacttaaaaaaataataatatcatttacaattaatagtataaactaaaaattaaacaaatcgttattataagtaatatcaaaatgatgatatacggattaatagcgtgtcttatattcgtgacttcatccatcgctagtccactttatattcccgttattccacccatttcggaagataaatcgttcaatagtgtagaggtattagtttccttgtttagagatgaccaaaaagactatacggtaacttctcagttcaataactacactatcgataccaaagactggactatcggcgtactatccacacctgatggtttggatataccattgactaatataacttattggtcacggtttactataggtcgtgcattgttcaaatcagagtctgaggatattttccaaaagaaaatgagtattctaggtgtttctatagaatgtaagaagtcgtcgacattacttacttttttgaccgtgcgtaaaatgactcgagtatttaataaatttccagatatggcttattatcgaggagactgtttaaaagccgtttatgtaacaatgacttataaaaatactaaaactggagagactgattacacgtacctctctaatggggggttgcctgcatactatcgtaatggggtcgatggttgattattgattagtatattccttattctttttattcacacaaaaagaacatttttataaacatgaaaccactgtctaaatgtaattatgatcttgatttatagatgaagatcagcctttagaggattttaaccagtatgtttaatatgaaaaaaataaacataacatattttgagattaagcgctattgtgcaagattatattagaatcaaattaatctttcatacgagaaaaataacgacatacgtcgtcaacaaattaaactttttatttattagttaactagcttatagaacttgctcattgttatgtttctaaaacgggtacgacatataggacaattatccgacgcaccggtttctcttcgtgttttatgccatatattgatgcatgttatgcaaaatatatgagtacacgaatccaataaaccaaagtatctatcgttttgagtaaacaacttcatagcaaattccacattctttttctttacttactctatacacgtcctcgtatttatccagtattttgatgatatccaactcagaaatggttgttgtattattgggtgtattgggagtataggtattattagctatgtaccaatttaccaaccctcttaatattgattgaacaatcacatcggttatccaatcaataaccacattaataactaaattgtagtgtatatatagaccatatatgtttctatttttttgacagttacgtatagtttcagtaagttttgattgttgtattcctgtatctctagataagttagtcatatagtcccttccggcgatacgttttttccaagcccgaaattgattagccaaatgtgtatttatttttgtgatattgatataatatgtaatgttattaatatttcggataatgcatactgttagtcttatatcatttggttcatctatgtattgtaatattgttacatgatctatagatgatgtattgattttggcaggatcgaattccatatccgcgactaaacagtgaaaaaaatgtaaatactttttaaattttaaattagtaaaacttttttttattttttatgattccaaaaatactgaatacaaagtcctaaattataaatatggagatcatactaccacaacttattattatgcatactcagccggtgtaatagatagatatatataattctattacaccggcagacaattaccgatcggtatttgtcgttaccaacataccgtataatatgtaatatacaattccataacccattgacagttgttatacatcaaaattgcaattcttttgattacgatgttataagaatgtagttaattgatgtatgatgttaatgtgtcctctttcctcttataacatcgtaatcaaaaacttttttataatatatacctaataatgtgtcttaatagttctcgtgattcgtcaaacaatcattcttataaaatataataaagcaacgtaaaacacataaaaataagcgtaactaataagacaatggatatttacgacgataaaggtctacagactattaaactgtttaataatgaatttgattgtataaggaatgacatcagagaattatttaaacatgtaactgattccgatagtatacaacttccgatggaagacaattctgatattatagaaaatatcagaaaaatactatatagacgattaaaaaatgtagaatgtgttgacatcgatagtacaataacttttatgaaatacgatccaaatgatgataataagcgtacgtgttctaattgggtacccttaactaataactatatggaatattgtctagtaatatatttggaaacaccgatatgtggaggcaaaataaaattataccaccctacaggaaatataaagtcggataaggatattatgtttgcaaagactctagactttaaatcaaagaaagtgttaactggacgtaaaacaattgccgttctagacatatccgtttcatataatagatcaatgactactattcactacaacgacgacgttgatatagatatacatactgataaaaatggaaaagagttatgttattgttatataacaatagatgatcattacttggttgatgtggaaactataggagttatagtcaatagatctggaaaatgtctgttagtaaataaccatctaggtataggtatcgttaaagataaacgtataagcgatagttttggagatgtatgtatggatacaatatttgacttttctgaagcacgagagttattttcattaactaatgatgataacaggaatatagcatgggacactgataaactagacgatgatacagatatatggactcccgtcacagaagatgattacaaatttctttctagactagtattgtatgcaaaatctcaatcggatactgtattcgactattatgttcttactggtgatacggaaccacccactgtattcattttcaaggtaactagattttactttaatatgccgaaataaaaaatttttgtataatatctagaggtagaggtattgtttagataaatacaaataacatagatacatcgcatacttagcatttttataaatatacataagacatacactttatacattttttttgtaaaaatactcataaaaaaatttataaaaattatggcacaaccatatcttgtataggtagtttagttcgtcgagtgaacctataaacagataatagacaacacgtaataataataatgcctactaatacaagcataataccgggagatgggatatatgacgttgtagtgtttgggttttctgaacgttgatagtctactaatactacatgctgacatctaatgcctgtataaccatgagagcatctacaatacataccgtcaatatctctagcgtggatacagtcaccgtgtaaacaatatccatctccctctggaccgcataatctgatagctggaatatctgttgtagcgtttgtaatttctggcgatgtcgtttcgatagcgttaccactatcggcgaatgatctgattatcatagcagcgaacaacaacatcagatatttcatcgacatttttgatggattttgtgtttatgctgtttctcagtgtgtgtttatgacaagattgggaattttatattattaattcagtaatataaactaataatatattgttaattgtgtaaataatataaaaataacaatacaatattgaatgtgttgctgttaaaaatgatcataaacacggagtttattttatatgtctcgcataaacattactaaaaaaatatattgttctgtttttctttcacatctttaattatgaaaaagtaaatcattatgagatggacgagattgtacgcatcgttcgcgacagtatgtggtacatacctaacgtatttatggacgacggtaagaatgaaggtcacgtttctgtcaacaatgtctgtcatatgtatttcacgttctttgatgtggatacatcgtctcatctgtttaagctagttattaaacactgcgatctgaataaacgaggtaactctccattacattgctatacgatgaatacacgatttaatccatctgtattaaagatattgttacaccacggcatgcgtaactttgatagcaaggatgaaaaaggacaccactatcaatcgataacaagatctttgatatactaacggacaccattgatgactttagtaaatcatccgatctattgctgtgttatcttagatataaattcaatgggagcttaaactattacgttctgtacaaaggatccgacgaggatgaactcacttctcttcattactactgtaaacacatatccacgttctacaaaagcaattattacaagttaagtcacactaagatgcgagccgagaagcgattcatctacgcgataatagattatggagcaaacattaacgcggttacacacttaccttcaacagtataccaaacatagtcctcgtgtggtgtatgctcttttatctcgaggagccgatacgaggatacgtaataatcttgattgtacacccatcatggaacgattgtgcaacaggtcatattctcataatgttactcaattggcacgaacaaaaggaagaaggacaacatctactttatctattcataaaacataatcaaggatacactctcaatatactacggtatctactagataggttcgacattcagaaagacgaatactataataccgcctttcaaaattgtaacaacaatgttgcctcatacatcggatacgacatcaaccttccgactaaagacggtattcgacttggtgtttgaaaacagaaacatcatatacaaggcggatgttgtgaatgacatcatccaccacagactgaaagtatctctacctatgattaaatcgttgttctacaagatgtctctccctacgacgattactacgtaaagaagataatagcctactgcctattaagggacgagtcattcgcggaactacatagtaaattctgtttaaacgaggactataaaagtgtatttatgaaaaatatatcattcgataagatagattccatcatcgtgacataagtcgccttaaagagattcgaatctccgacaccgacctgtatacggtatcacagctatcttaaagccatacattcagacagtcacatttcatttcccatgtacgacgatctcatagaacagtgccatctatcgatggagcgtaaaagtaaactcgtcgacaaagcactcaataaattagagtctaccatcggtcaatctagactatcgtatttgcctccggaaattatgcgcaatatcatctaaacagtatgttgtacgaaaagaaccattacaaatattatccatgatagaaagaaaatatctatatgattggagaagtaggaaacaggaacaagacgacgattactacattattaaatcatgaagtccgtattatactcgtatatattgtttctctcatgtataataataaacggaagagatatagcaccgcatgcaccatccgatggaaagtgtaaagacaacgaatacaaacgccataatttgtgtccgggaacatacgcttccagattatgcgatagcaagactaacacacaatgtacgccgtgtggttcgggtaccttcacatctcgcaataatcatttacccgcttgtctaagttgtaacggaagacgcgaccgtgtaacacgactcacaatagaatctgtgaatgctctcccggatattattgtcttctcaaaggatcatccggatgcaaggcatgtgtttcccaaacaaaatgtggaataggatacggagtatccggagacgtcatctgttctccgtgtggtctcggaacatattctcacaccgtctcttccgcagataaatgcgaacccgtacccagtaatacctttaactatatcgatgtggaaattaatctgtatccagttaacgaccactaccggtctcagcgaatccatctcaacgtcggaactaactattactatgaatcataaagactgtaatcccgtatttcgtgaggaatacttctccgtccttaataaggtagcaacttcaggtttctttacaggagaaaggtgtgcactctgaatttcgagattaaatgcaataacaaaaatttttcctccaaacagttaacgaaagcaaagaatgatgacggtatcatgccgcattcggagactgtctatctagcgtcgacatctatatactatatagtaataccaatactcaagactacgaaactgatacaatctcttatcatgtgggtaatgttctcgatgtcgatagccatatgcccggtagttgcgatatacataaactgatcactaattccaaacccacccgctttttatagtaagtttttcacccataaataataaatacaataattaatttctcgtaaaagtagaaaatatattctaatttattgcacggtaaggaagtagaatcataaagaacagtactcaatcaatagcaatcatgaaacaatatatcgtcctggcatgcatgtgcctgccagtcttcagcaatcatcctcatcctcctcctcgtgtacggaagaagaaaacaaacatcatatgggaatcgatgttattatcaaagtcacaaagcaagaccaaacaccgaccaatgataagatttgccaatccgtaacggaaattacagagtccgagtcagatccagatcccgaggtggaatcagaagatgattccacatcagtcgaggatgtagatcctcctaccacttattactccatcatcggtggaggtctgagaatgaactttggattcaccaaatgtcctcagattaaatccatctcagaatccgctgatggaaacacagtgaatgctagattgtccagcgtgtccccaggacaaggtaaggactctcccgcgatcactcatgaagaagctctggctatgatcaaagactgtgaggtgtctatcgacatcagatgtagcgaagaagagaaagacagcgacatcaagacccatccagtactcgggtctaacatctctcataagaaagtgagttacgaagatatcatcggttcaacgatcgtcgatacaaaatgtgtcaagaatctagagtttagcgttcgtatcggagacatgtgcaaggaatcatctgaacttgaggtcaaggatggatttaagtatgtcgacggatcggcatctgaaggtgcaaccgatgatacttcactcatcgattcaacaaaactcaaagcgtgtgtctgaatcgataactctattcatctgaaattggatgagtagggttaatcgaacgattcaggcacaccacgaattaaaaaagtgtaccggacactatattccggtttgcaaaacaaaaatgttcttaactacattcacaaaaagttacctctcgcgacttcttctttttctgtctcaatagtgtgatacgattatgacactattcctattcctattcctatttcctttcagggtatcacaaaaatattaaacctctttctgatggtctcataaaaaaagttttacaaaaatatttttattctctttctctctttgatggtctcataaaaaaagttttacaaaaatatttttattctctttctctctttgatggtctcataaaaaaagttttacaaaaatatttttattctctttctctctttgatggtctcataaaaaaagttttacaaaaatatttttattctctttctctctttgatggtctcataaaaaaagttttacaaaaatatttttattctctttctctctttgatggtctcataaaaaaagttttacaaaaatatttttattctctttctctctttgatggtctcataaaaaaagttttacaaaaatatttttattctctttctctctttgatggtctcataaaaaaagttttacaaaaatatttttattctctttctctctttgatggtctcataaaaaatattaaacctctttctgatggtgtcactaaaatatttttattctcattctcattttctctttctctcttcaatggagtcataaaatatttttattctctttctctcttcgatggtctcacaaaaatattaaacctctttctgatggtgtcactaaaatatttttattctcattctcattttctctttctctcttcaatggagtcataaaatatttttattctctttctctcttcgatggtctcacaaaaatattaaacctctttctgatggagtcgtaaaaaagttttatctctttctctcttcgatggtctcacaaaaatattaaacctctttctgatggagtcgtaaaaaagttttatctctttctctcttcgatggtctcacaaaaatattaaacctctttctgatggagtcgtaaaaaagttttatctctttctctcttcgatggtctcacaaaaatattaaacctctttctgatggagtcgtaaaaaagttttatctctttctctcttcgatggtctcacaaaaatattaaacctctttctgatggagtcgtaaaaaagttttatctctttctctcttcgatggtctcacaaaaatattaaacctctttctgatggagtcgtaaaaaagttttatctctttctctcttcgatggtctcacaaaaatattaaacctctttctgatggagtcgtaaaaaagttttatctctttctctcttcgatggtctcacaaaaatattaaacctctttctgatggagtcgtaaaaaagttttatctctttctctcttcgatggtctcacaaaaatattaaacctctttctgatggagtcgtaaaaaagttttatctctttctctcttcgatggtctcacaaaaatattaaacctctttctgatggagtcgtaaaaaagttttatctctttctctcttcgatggtctcacaaaaatattaaacctctttctgatggagtcgtaaaaaagttttatctctttctctcttcgatggtctcacaaaaatattaaacctctttctgatggagtcgtaaaaaagttttatctctttctctcttcgatggtctcacaaaaatattaaacctctttctgatggagtcgtaaaaaagttttatctctttctctcttcgatggtctcacaaaaatattaaacctctttctgatggagtcgtaaaaaagttttatctctttctctcttcgatggtctcacaaaaatattaaacctctttctgatggagtcgtaaaaaagttttatctctttctctcttcgatggtctcacaaaaatattaaacctctttctgatggagtcgtaaaaaagttttatctctttctctcttcgatggtctcacaaaaatattaaacctctttctgatggagtcgtaaaaaagttttatctctttctctcttcgatggtctcacaaaaatattaaacctctttctgatggagtcgtaaaaaagttttatctctttctctcttcgatggtctcactaaaatattttttattctctttctgatgcatcaactatttcttaaacaataacgtccaacaacatatactcgtcgagcttatcaacatcccctatgcccatctaggttaccagacaattgtatatcataaaataatgtttataatttacacgttaaaatcatataataaaacgtagatcgtataatattttttggtatataaatgatctagtaaaatccatgtaggggatactgctcacattttttctttggtacaaaatttcacacaagtttttatacagacaaattcttgtccatatattttaaaacattgacttttgtactaagaaaaatatctagatcaactatctctttctctttctctcttcgatggtctcacaaaaatattaaacctctttctgatggagtcgtaaaaaagttttatctctttctctcttcgatggtctcacaaaaatattaaacctctttctgatggagtcgtaaaaaagttttatctctttctctcttcgatggtctcacaaaaatattaaacctctttctgatggagtcgtaaaaaagttttatctctttctctcttcgatggtctcacaaaaatattaaacctctttctgatggagtcgtaaaaaagttttatctctttctctcttcgatggtctcacaaaaatattaaacctctttctgatggagtcgtaaaaaagttttatctctttctctcttcgatggtctcacaaaaatattaaacctctttctgatggagtcgtaaaaaagttttatctctttctccttcgatggtctcacaaaaatattaaacctctttctgatggagtcgtaaaaaagttttatctctttctctcttcgatggtctcacaaaaatattaaacctctttctgatggagtcgtaaaaaagttttatctctttctctcttcgatggtctcacaaaaatattaaacctctttctgatggagtcgtaaaaaagttttatctctttctccttcgatggtctcacaaaaatattaaacctctttctgatggagtcgtaaaaaagttttatctctttctccttcgatggtctcacaaaaatattaaacctctttctgatggagtcgtaaaaaagttttatctctttctctcttcgatggtctcacaaaaatattaaacctctttctgatggagtcgtaaaaaagttttatctctttctctcttcgatggtctcacaaaaatattaaacctctttctgatggtctctataaagcgatcgatctttcttacactctagagtttcctacagtcatgggtcacacatttttttctagacactaaataaaattagtaaaattaaattaattataaaattatatatataatttactaactttagttagataaattaataatatataagttttagtacattaatattatattttaaat

SEQ ID NO: 22 - DNA, 191737 bp, Vaccinia virus
  Vaccinia virus Copenhagen
gtaaaattaaattaattataaaattatgtatatgatttactaactttagttagataagttagtaatacataaattttagtatattaatattatattttaaatatttatttagtgtctagaaaaaaatgtgtgaccaacgaccgtaggaaactctagagggtaagaaaaatcaatcgctttatagagaccatcagaaagaggtttaatatttttgtgagaccatcgaaggagaaagagataaaacttttttacgactccatcagaaagaggtttaatatttttgtgagaccatcgaaggagaaagagataaaacttttttacgactccatcagaaagaggtttaatatttttgtgagaccatcgaaggagaaagagataaaacttttttacgactccatcagaaagaggtttaatatttttgtgagaaaggagaaagagataaaacttttttacgactccatcagaaagaggtttaatatttttgtgagaccatcgaaggagaaagagataaaacttttttacgactccatcagaaagaggtttaatatttttgtgagaccatcgaaggagaaagagataaaacttttttacgactccatcagaaagaggtttaatatttttgtgagaccatcgaaggagaaagagataaaacttttttacgactccatcagaaagaggtttaatatttttgtgagaccatcgaaggagactccatcagaaagaggtttaatatttttgtgagaaaggagaaagagataaaacttttttacgactccatcagaaagaggtttaatatttttgtgagaaaggagaaagagataaaacttttttacgactccatcagaaagaggtttaatatttttgtgagaccatcgaaggagaaagagataaaacttttttacgactccatcagaaagaggtttaatatttttgtgagaccatcgaaggagaaagagataaaacttttttacgactccatcagaaagaggtttaatatttttgtgagaccatcgaagagagaaagagataaaacttttttacgactccatcagaaagaggtttaatatttttgtgagaccatcgaagagagaaagagataaaacttttttacgactccatcagaaagaggtttaatatttttgtgagaccatcgaagagagaaagagataaaacttttttacgactccatcagaaagaggtttaatatttttgtgagaccatcgaagagagaaagagataaaacttttttacgactactccatcagaaagaggtttaatatttttgtgagaccatcgaagagagaaagagataaaacttttttacgactccatcagaaagaggtttaatatttttgtgagaccatcgaagagagaaagagataaaacttttttacgactccatcagaaagaggtttaatatttttgtgagaccatcgaagagagaaagagataaaacttttttacgactccatcagaaagaggtttaatatttttgtgagaccatcgaagagagaaagagataaaacttttttacgactccatcagaaagaggtttaatatttttgtgagaccatcgaagagagaaagagataaaacttttttacgactccatcagaaagaggtttaatatttttgtgagaccatcgaagagagaaagagataaaacttttttacgactccatcagaaagaggtttaatatttttgtgagaccatcgaagagagaaagagataaaacttttttacgactccatcagaaagaggtttaatatttttgtgagaccatcgaagagagaaagagataaaacttttttacgactccatcagaaagaggtttaatatttttgtgagaccatcgaagagagaaagagataaaacttttttacgactccatcagaaagaggtttaatatttttgtgagaccatcgaagagagaaagagataaaacttttttacgactccatcagaaagaggtttaatatttttgtgagaccatcgaagagagaaagagataaaacttttttacgactccatcagaaagaggtttaatatttttgtgagaccatcgaagagagaaagagataaaacttttttacgactccatcagaaagaggtttaatatttttgtgagaccatcgaagagagaaagagataaaacttttttacgactccatcagaaagaggtttaatatttttgtgagaccatcgaagagagaaagagataaaacttttttacgactccatcagaaagaggtttaatatttttgtgagaccatcgaagagagaaagagataaaacttttttacgactccatcagaaagaggtttaatatttttgtgagaccatcgaagagagaaagagataaaacttttttacgactccatcagaaagaggtttaatatttttgtgagaccatcgaagagagaaagagataaaacttttttacgactccatcagaaagaggtttaatatttttgtgagaccatcgaagagagaaagagataaaacttttttacgactccatcagaaagaggtttaatatttttgtgagaccatcgaagagagaaagagataaaacttttttacgactccatcagaaagaggtttaatatttttgtgagaccatcgaagagagaaagataaaacttttttacgactccatcagaaagaggtttaatatttttgtgagaccatcgaagagagaaagagataaaacttttttacgactccatcagaaagaggtttaatatttttgtgagaccatcgaagagagaaagagataaaacttttttacgactccatcagaaagaggtttaatatttttgtgagaccatcgaagagagaaagagaaagagatagttagtctagatatttttcttagtacaaaagtcaatgttttaaaatatatggacaagaatttgtctgtataaaaacttgtgtgaaattttgtaccaaagaaaaaatgtgagcagtatcccctacatggattttactagatcatttatataccaaaaaatattatacgatctacgttttattatatgattttaacgtgtaaattataaacattattttatgatatacaattgtctggtaacctagatgggcataggggatgttgataagctcgacgagtatatgttgttggacgttattgtttaagaaatagttgatgcatcagaaagagaataaaaaatattttagtgagaccatcgaagagagaaagagataaaacttttttacgactccatcagaaagaggtttaatatttttgtgagaccatcgaagagagaaagagaataaaaatattttatgactccattgaagagagaaagagaaaatgagaatgagaataaaaatattttagtgacaccatcagaaagaggtttaatatttttgtgagaccatcgaagagagaaagagaataaaaatattttatgactccattgaagagagaaagagaaaatgagaatgagaataaaaatattttagtgacaccatcagaaagaggtttaatattttttatgagaccatcaaagagagaaagagaataaaaatatttttgtaaaactttttttatgagaccatcaaagagagaaagagaataaaaatatttttgtaaaactttttttgtgagaccatcgaagagagaaagagaataaaaatatttttgtaaaactttttttatgagaccatcaaagagagaaagagaataaaaatatttttgtaaaactttttttatgagaccatcaaagagagaaagagaataaaaatatttttgtaaaactttttttatgagaccatcaaagagagaaagagaataaaaatatttttgtaaaactttttttatgagaccatcaaagagagaaagagaataaaaatatttttgtaaaactttttttatgagaccatcaaagagagaaagagaataaaaatatttttgtaaaactttttttatgagaccatcaaagagagaaagagaataaaaatatttttgtaaaactttttttatgagaccatcagaaagaggtttaatatttttgtgataccctgaaaggaaataggaataggaataggaatagtgtcataatcgtatcacactattgagacagaaaaagaagaagtaacgagaggtaactttttgtgaatgtagttaagaacatttttgttttgcaaaccggaatatagtgtccggtacacttttttaattcgtggtgtgcctgaatcgttcgattaaccctactcatccaatttcagatgaatagagttatcgattcagacacacgctttgagttttgttgaatcgatgagtgaagtatcatcggttgcaccttcagatgccgatccgtcgacatacttgaatccatccttgacctcaagttcagatgattccttgcacatgtctccgatacgaacgctaaactctagattcttgacacattttgtatcgacgatcgttgaaccgatgatatcttcgtaactcactttcttatgagagatgttagacccgagtactggatgggtcttgatgtcgctgtctttctcttcttcgctacatctgatgtcgatagacacctcacagtctttgatcatagccagagcttcttcacgagtgatcgcgggagagtccttaccttgtcctggggacacgctggacaatctagcattcactgtgtttccatcagcggattctgagatggatttaatctgaggacatttggtgaatccaaagttcattctcagacctccaccgatgatggagtaataagtggtaggaggatctacatcctcgactgatgtggaatcatcttctgattccacctcgggatctggatctgactcggactctgtaatttccgttacggattggcaaatcttatcattggtcggtgtttggtcttgctttgtgactttgataataacatcgattcccatatgatgtttgttttcttcttccgtacacgaggaggaggatgaggatgattgctgaagactggcaggcacatgcatgccaggacgatatattgtttcataattgctattgattgagtactgttctttatgattctacttccttaccatgcaataaattagaatatattttctacttttacgagaaattaattattgtatttattatttatgggtgaaaaacttactataaaaagcgggtgggtttggaattagtgatcagtttatgtatatcgcaactaccgggcatatggctatcgacatcgagaacattacccacatgataagagattgtatcagtttcgtagtcttgagtattggtattactatatagtatatagatgtcgacgctagatatacagtctccgaatgcggcatgataccgtcatcattctttgctttcgttaactgtttggaggaagaatctttgttattgcatttaatctcgaaattcagagtgcacacctttctcctgtaaagaatcctgaagtcgctaccttattaagaacggagaagtatccatcacgaaatacgggattacagtctttatgattcatagtaatagttagttccgacgttgagatggattcactgagaccggtagtggtcgtccgagtacacgacgtgtcgttgacgggatacagattaatttccacatcgatatagttaaaggtatttctgggtacgggttcgcatttatctgcggaagagacggtgtgagaatatgttccgagaccacacggagaacagatgacgtctccggatactccgtatcctattccacattttgtttgggaaacacatgccttgcatccggatgatcctttgagaagacaataatatccgggagagcattcacagattctattgtgagtagtgttacacgatcgcgtcttccgttacaacttagacaagcgggtaaatgattattgcgagatgtgaaggtacccgaaccacacggcgtacattgtgtgttagtcttgctatcgcataatctggaagcgtatgttcccggacacaaattatggcgtttgtattcgttgtctttacactttccatcggatggtgcatgcggtgctatatctcttccgtttattattatacatgagagaaacaatatatacgagtataatacggacttcataatttaataatgtagtaatcgttgtcgtgttcctgtttcctacttctccaatcatatagatattttctttctatcatggataatatttgtaatggttctttccgtacaacatactgtttagatgatattgcgcataatttccggaggcaaatacgatagtctagattgaccgatggtagactctaatttattgagtgctttgtcgacgagtttacttttacgctccatcgatagatggcactgttctatgagatcgtcgtacatgggaaatgaaatgtgtctgtccgaatgtatggcttcaagatagctgtgataccgtatacaggtcggtgtcggagattcgaatctctttgaggcgacttatgtcacgatgatggaatctatcttatcgaatgatatatttttcataaatacacttttatagtcctcgtttaaacagaatttactatgtagttccgcgaatgactcgtcccttaataggcagtaggctagtatcttttttacgtagtaatcgtcgtagggagagaattctgacatcttgtagaacaacgatttaatcataggtagagatactttcagtctgtggtggatgatgtcattcacaacatccgccttgtatatgatgtttctgttttcaaacaccaagtcgaataccgtctttagtcggaaggttgatgtcgtatccgatgtatgaggcaacattgttgttacaattttgaaaggcggtatatgtattcgtctttctgaatgtcgaacctatctagtagataccgtagtatattgagagtgtatccttgattatgttttatgaatagataaagtagatgttgtccttcttccttttgttcgtgccaattgagtaacattatgagaatatgacctgttgcacaatcgttccatgatgggtgtacaatcaagattattacgtatcctcgagataaaagagcatacaccacacgaggactatgtttggtatactgttgaaggtaagtgtgtaaccgcgttaatgtttgctccataatctattatcgcgtagatgaatcgcttctcggctcgcatcttagtgtgacttaacttgtaataattgcttttgtagaacgtggatatgtgtttacagtagtaatgaagagaagtgagttcatcctcgtcggcgcaattagggtcggatcctttgtacagaacgtagtagtttaagctcccattgaatttatatctaagataacacagcaatagatcggatgatttactaaagtcatcaatggtgtccgttagtatatcaaagatcttgttatcgattgatagtgaatgaatcagatagtggtgtcctttttcatccttgctatcaaagttacgcatgccgtggtgtaacaatatctttaatacagatggattaaatcgtgtattcatcgtatagcaatgtaatggagagttacctcgtttattcagatcgcagtgtttaataactagcttaaacagatgagacgatgtatccacatcaaagaacgtaaaatacatatgacaaacattgttgacagaaacgtgaccttcattcttaccgtcgtccataaatacgttaggtatgtaccacatactgtcgcgaacgatgctcacaatctcgtccatctcgcccatctcatacatttcatcatttactttttcataattagagatgtacgaaagaaaaagaaaaagaaaaagaaaaacagaacaatatatttttttagtaatgtttatgcgagacatataaaataaactccgtgtttatgatgccggtaaatgtttttatcatcttggacggaatcgattttgtaatatgtcatggaaacaaatgaaacaggacattatcactccatgataaattatttaatggagtaataaagtatctccatgggtaatttcgaaatcaagttatcgtctgtattaatgttgtccactatggagtcgatcctctcactgttctttacagtttctgtaatgatggacgttagttcttttttgtaccatttgatgtcggattctttgcgtatctcagtctgtggcgtttgcttcgtttaaataatatatcaaacatggagacgcctgatatgtaggcattcttcattctattaatgtctactctatagcgctttagttccttatgatgaccggcgatatcatacttactttagaaggaaaatcatcatctaggattaaggcgtatctgatacaggcgaataatggttcaggatatagatagcgtatatctctattaaatgcgtcaatcatagtctctagagtgggatggtagctaagtaataaatcaactatcctcgttttgttttctctttggtaactgcttttctggatggccgtattgattatcgagcgtgatgttgtaacactcgctccatattccaataaccgctttgcaaattgtatattattgacatcgaccgcgtaatatagtagagttttattctcattatcgatcatatctatatcatccatgtacttgcttagtatatcaaatacatctattagtatggtttcataacagtgatacccgcaattattaaatctcgataatatcagaccgtacatacatagacggccattgttagatatgtgatttacagccgcgtgtccatattttccacgataaaccttacgacgtttacatcgacgagattattattaacaaagtagtcgtgcagaggatagttgttgtccgttatctaacatgcatcgaacgaccatatcgccgtaatgtaagtagtttatcaacatggcttgtacgatggattcatcctgttgtctaaatctctttagaatgttatcgatgatgtagtggttatattctctggaatcgtacgaagtaatactacgcattacgtcgacaagagtatgacgtctctcaataagaagattaacgatttccatgtctacattatatggggttactctaaatcgcttgtttagataatacgcctctaatatagggctgacgtcgtatactctacacgtgtccacatcctttattaataataatttaacaatctctatatctatggttgagaaagaccagtagtattggatgggtaaagatcctccttcgtctctgccatggatggaaacattgttattgatcaaacatttaattacatccttggatagagattgagattctctatgagacgatatatagtaatgaagagagttcttacacatatcactgttgtacatacaggtacgaaatacgtaaccggtgctgtaacattctgatttaagaagccatagcaatacttctggtctcggattaggcgtcgttacgtatatatccaccaatccgagaccattgattgcataattcgtattcttggacggacgtatccgtttatccacaattaggtattttagcagacgtaagtcgatattatccgaagacagatcgaaatcatttatattcgacttgagttcgttagaggaattcgaatagctggatatcagtagatgcacaatctgagattttacgtatctatgcttactgtatgctcctagcggagttaatccttcgttgtttctacaaagtctctcgactccgcgagagagtaacagtcgaacaatcttaatgtctgtatcgcatttattggagacgtaacaatgtagcgcattgtttcctcgtctatctatatgttttgataagttgtgacacgtttcaatctctagttttatttttttgtacgtcacatcttcatccagtagacgacatagaatagtgcactctctaccacaataatccatagctattctggtgctaattattcctatttcacgaaaaatgatgaaggcaatcattcctcataagatgataaaaagtgtagtgagagagcatgaaggagatttagtatttagcagtgcggatatgatccaagagggtgagatagtcgttctcgttcagaatctttcgcagcataagtagtatgtcgatatacttatcgttgaagactcttccagagacgatagctgattgagtacaaagtccaatgattgcacgaagttcttcggcggttttcatggagtcatttctgatgaaacatttaatgatctccacgcaattgtcgatattgtcccacggaagtgaatccttcaactcaccaccaaagagctccgttgcatcagttctgaaagagatgagaagcctgtagagagaccctgcgctttctctatgggtccatctatgagaaacccacaggatgtattcagtcagacaatgtctgacgtcggccacggtattcagggagtccttagtagcgtggcaatgacagggtctgaactgggcacaaggaaaggccattgtaaaggtagacctgtagccgtttatgctaatagagggctttaatttccatttttttaatgggttgtggatgaggaatgagagtgatatcatattgagatacgtagttatgtagaggtgtatttcctatattatttactttcggtttcatattttaccaactctttaataaatttcttttcacgatgcatcttattgaatgacgttttctcataagtggacatatagatgcagaagtaatgaagaaaagtattacctctatcatctacataattagggtctgctcctttttttaacaacttatacagtacgtagtagtagtttatcggttttaaatcaagtctagaatatatagtggattaatatatttttatattagctaaagctatctatactatcagaaagcatatcattctcaacttcatcatgagttaaatatttgtgtaatggatgtcatgaacattaaacgtattcatgacatactcctttaataggttttttaaaacagatgattcaaatccttcattcattagataacagtgtaacggagtcgtaccttctactagtttgtttatatcacagcattctacaaacagtctaaacaatagagaagacggacagactttaacgtataaatgacacatgttatcgatattcgttgatgaattattattaaacgtagttatgataaatgattctaacgacatctctcgctagagataaaatctagtatcgtatcattaaacatctttgcatcatactcgcatagcatagtttttcataattaatacaatatttaaaagacttattcggaaagtattttaatacatgtatcatcgatggagatccatatgaggagtcacttgtagttcttcagtagtaataacagtgctatcatcgatagtataattatatgtagaaggttcatatgttgttgtaattggagtaactgttggtagttcttccgtggaatcaataattatactaacagcaatagtataattatataaatatgttccgttgatatcacatattttaatgaactcatttctaacaccctcagctatatctgtccaattaaatgtagccaacaatctactacgttctctttgattgactacttgtacggtagcgacgctacactatctttattgtcttctacatgctccaattgaatgtcatgatacaacgcagtttttcttatgcatgtttcataacaccacgaacatgtcgcagtaagatatatagccagagataatttctgtaaattcatgattgccggtcataaacaagcccgtcaataattgtggctatatattcagtttatagagcaaaataattaagcacaatagcgcttaatctcaaaatatgttatgtttatttttttcatattaaacatactggttaaaatcctctaaaggctgatcttcatctataaatcaagatcataattacatttagacagtggtttcatgtttataaaaatgttctttttgtgtgaataaggaatatactaatcaataatcaaccatcgaccccattacgatagtatgcaggcaacccccattagagaggtacgtgtaatcagtctctccagttttagtatttttataagtcattgttacataaacggcttttaaacagtctcctcgataataagccatatctggaaatttattaaatactcgagtcattttacgcacggtcaaaaaagtaagtaatgtcgacgacttcttacattctatagaaacacctagaatactcattttcttttggaaaatatcctcagactctgatttgaacaatgcacgacctatagtaaaccgtgaccaataagttatattagtcaatggtatatccaaaccatcaggtgtggatagtccagtctttggtatcgatagtgtagttattgaactgagaagttaccgtatagtctttttggtcatctctaaacaaggaaactaatacctctacactattgaacgatttatcttccgtaatgggtggactagcgatggatgaagtcacgaatataagacacgctattaatccgtatatcatcattttgatattacttataataacgatttgtttaatttttagtttatactattaattgtaaatgatattattatttttttaagtattatcagctttagtttatactattactatttgtaatatttagacatagataaacgtgataaaagtctatttgtttatatttattgcggatagcagtatttccctataaaaagtatacgtcctgtggtgtctttaatcatgtacatgaatggatggtttatgtagaccttcgtacgatataccatcgaaaagttaatcgtaaatactcctgtaacggccgatgcttctgtatactcctcattaacatctataaacgtcgtatgtagaaatttttctacagtgatagtttcattacacatcttgctaaaatctgcataatatccgaatatattagtaagtcctaaattttctaaaatcggtaccagattatacggttctgtcatttccactttaaactttggcatatacaagtctatacttttagtagataacataccacaccattttttaaatttttcatctgttatatttttttctatgttatatataccttctatgtcgtccggtagtataatcaccatactagagtttccctcgtatggaatatcgataatagagaatcctccgaataattcattaatatgtacatattgcaagttattctcggtacccaccatcatatcaacactggtaactatattcttagaaatataaaacttgtctgtatatgtaagatgtttagaaaatggatatttccacattgctttaaaatggacggcgctaacaactgtcatacgagtattaatggatagcggactagtcaataaggaattaattttaccatttgtcattgtcttaacccattcgttgattagttcctttgtttggttagcattattaaagtttacagtttgaaaatcgtcttttattttttgtaggaaggaggcgtggaactcgatactatcgctaccgtatattttatttgcggtagctagtgtcgcacaatacggaatatctacgtccatgtcattattgtcatcgggtgtattctcattcatattctctatatattttgatagttgttcagctgtagaaccagctgctccatgatttagaatagataaagtagataaaatagaaactggagaaatcaaaacattttcatcagggtgttttacgattagttctttaaagatatccatggtatagaccaaacaataacgataacgatatatatcataaataaataatgttaaatttcagtttatgtttgtaccccgtattcatacttaacaaattggtattgcgtacacaatcaatcatattacataccattaataatgcaagcataaaaaatcgttagtagatgtttctaaatataggttccgtaagcaaagaatataagaatgaagcggtaatgataaaatcaatcgttatctaaaatgatcatactcatttattttattctattatattaacacatacatttttaacagcaacacattcaatattgtattgttatttttatattatttacacaattaacaatatattattagtttatattactgaattaataatataaaattcccaatcttgttataaacacacactgagaaacagcataaacacagaatccatcaaaaatgtcgatgaaatatctgatgttgttgttcgctgctatgataatcagatcattcgccgatagtggtaacgctatcgaaacgacattgccagaaattacaaacgctacaacagatattccagctatcagattatgcggtccagagggagatggatattgtttacacggtgactgtatccacgctagagatatcgacggtatgtattgtagatgctctcatggttatacaggcattagatgtcagcatgtagtattagtagactatcaacgttcagaaaacccaaacactacaacgtcatatatcccatctcccggtattatgcttgtattagtaggcattattattattattacgtgttgtctattatctgtttataggttcactcgaagaactaataaactacctctacaagatatggttgtgccataatttttataaattttttttatgagtatttttacaaaaatgtataaagtgtatgtcttatgtatatttataaaaatgctaaatatgcgatgtatctatgttatttgtatttatctaaacaatacctctacctctagatattatacaaaaattttttatttcagcatattaaagtaaaatctagttaccttgaaaatgaatacagtgggtggttccgtatcaccagtaagaacataatagtcgaatacagtatccgattgagattttgcatacaatactagtctagaaagaaatttgtaatcatcttctgtgacgggagtccatatatctgtatcatcgtctagtttatcagtgtcccatgctatattcctgttatcatcattagttaatgaaaataactctcgtgcttcagaaaagtcaaatattgtatccatacatacatctccaaaactatcgcttatacgtttatctttaacgatacctatacctagatggttatttactaacagacattttccagatctattgactataactcctatagtttccacatcaaccaagtaatgatcatctattgttatataacaataacataactcttttccgtttttatcagtatgtatatctatattaacgtcgtcgttgtagtgaatagtagttattgatctattatatgaaacggatatgtctagaacggcaattgttttacgtccagttaacactttctttgatttaaagtctagagtctttgcaaacataatatccttatccgactttatatttcctgtagggtggtataattttattttgcctccacatatcggtgtttccaaatatattactagacaatattccatatagttattagttaagggtacccaattagaacacgtacgcttattatcatcatttggatcgtatttcataaaagttattgtactatcgatgtcaacacattctacattttttaatcgtctatatagtatttttctgatattttctataatatcagaattgtcttccatcggaagttgtatactatcagaatcagttacatgtttaaataattctctgatgtcattccttatacaatcaaattcattattaaacagtttaatagtctgtagacctttatcgtcgtaaatatccattgtcttattagttacgcttatttttatgtgtttttacgttgctttattatattttataagaatgattgtttgacgaatcacgagaactattaagacatatattattagaggtatatattataaaaaagtttttgattacgatgttataagaggaaagaggacacattaacatcatacatcaattaactacattcttataacatcgtaatcaaaagaattgcaattttgatgtataacaactgtcaatgggttatggaattgtatattacatattatacagtatgttggtaacgacaaataccgatcggtaattgtctgccggtgtaatagaattatatatatctatctattacaccggctgagtacctacactattatatgattatagtttctatttttacagtaccttaactaaagtctctagtcacaagagcaatactaccaacctacactattatatgattatagtttctatttttataggaacgcgtacgagaaaatcaaatgtctaatttctaacggtagtgttgataaacgattatcgtcaatggatacctcctctatcatgtcgtctattttcttactttgttctattaacttattagcattatatattatttgattataaaacttatattgcttattagcccaatctgtaaatatcggattattaacatatcgtttctttgtaggtttatttaacatgtacatcactgtaagcatgtccgtaccatttattttaatttgacgcatatccgcaatttctttttcgcagtcggttataaattctatatatgatggatacatgctacatgtgtacttataatcgactaatatgaagtacttgatacatattttcagtaacgatttattattaccacctatgaataagtacctgtgatcgtctaggtaatcaactgttttcttaatacattcgatggttggtaatttactcagaataatttccaatatcttaatatataattctgctatttctggaatatatttatctgccagtataacacaaatagtaatacatgtaaacccatattttgttattatattaatgtctgcgccattatctattaaccattctactaggctgacactatgcgacttaatacaatgataaagtatactacatccatgtttatctattttgtttatatcatcaatatacggcttacaaagttttagtatcgataacacatccaactcacgcatagagaaggtagggaataatggcataatatttattaggttatcatcattgtcattatctacaactaagtttccattttttaaaatatactcgacaactttaggatctctattgccaaatttttgaaaatatttatttatatgcttaaatctatataatgtagctccttcatcaatcatacatttaataacattgatgtatactgtatgataagatacatattctaacaatagatcttgtatagaaactgtatatcttttaagaattgtggatattaggatattattacgtaaactattacacaattctaaaatataaaacgtatcacggtcgaataatagttgatcaactatataattatcgattttgtgatttttcttcctaaactgtttacgtaaatagttagatagaatattcattagttcatgaccactatagttactatcgaataacgcgtcaaatatttcccgtttaatatcgcatttgtcaagataataatagagtgtggtatgttcacgataagtataataacgcatctcttttttgtgtgaaattaaatagtttattacgtccaaagatgtagcataaccatcttgtgacctagtaataatataataatagagaactgttttacccattctatcatcataatcagtggtgtagtcgtaatcgtaatcgtctaattcatcatcccaattataatattcaccagcacgtctaatctgttctattttgatcttgtatccatactgtatgttgctacatgtaggtattcctttatccaataatagtttaaacacatctacattgggatttgatgttgtagcgtatttctctacaatattaataccatttttgatactatttatttctatacctttcgaaattagtaatttcaataagtctatatcgatgttatcagaacatagatattcgaatatatcaaaatcattgatatttttatagtcgactgacgacaataacaaaatcacaacatcgtttttgatattattatttttcttggtaacgtatgcctttaatggagtttcaccatcatactcatataatggatttgcaccactttctatcaatgattgtgcactgctggcatcgatgttaaatgttttacaactatcatagagtatcttatcgttaaccatgattggttgttgatgctatcgcattttttggtttctttcatttcagttatgtatggatttagcacgtttgggaagcatgagctcatatgatttcagtactgtagtgtcagtactattagtttcgatcagatcaatgtctagatctatagaatcaaaacacgataggtcagaagataatgaatatctgtacgcttctttttgtactgtaacttctcgttttgttagatgtttgcatcgtgctttaacatcaatggtacaaattttatcctcgctttgtgtatcatattcgtccctactataaaattgtatattcagattatcatgagatgtgtatacgctaacggtatcaataaacggagcacaccatttagtcataaccgtaatccaaaaatttttaaagtatatcttaacgaaagaagttgtatcatcgttaggatttggtaaatcattatctacagtgtatggtactagatcctcataagtgtatatatctagagtaatgtttaatttatcaaatggttgataatatggatcctcatgacaatttccgaagatggaaatgagatatagacatgcaataaatctaatcgaagacatggttactccttaaaaaaatacgaataatcaccttggctatttagtaagtgtcatttaacactatactcatattaatccatggactcataatctctatacgggattaacggatgttctatatacggggatgagtagttctcttctttaactttatactttttactaatcatatttagactgatgtatgggtaatagtgtttgaagagctcgttctcatcatcagaataaatcaatatctctgtttttttgttatacagatgtattacagcctcatatattacgtaatagaacgtgtcatctaccttattaactttcaccgcatagttgtttgcaaatacggttaatcctttgacctcgtcgatttccgaccaatctgggcgtataatgaatctaaactttaatttcttgtaatcattcgaaataatttttagtttgcatccgtagttatcccctttatgtaactgtaaatttctcaacgcgatatctccattaataatgatgtcgaattcgtgctgtatacccatactgaatggatgaacgaataccgacggcgttaatagtaatttactttttcatctttacatattgggtactagttttactatcataagtttataaattccacaagctactatggaataagccaaccatcttagtataacacacatgtcttaaagtttattaattaattacatgttgttttatatatcgctacgaatttaaacagagaaatcagtttaggaaaaaaaattatctatctacatcatcacgtctctgtattctacgatagagtgctactttaagatgagacatatccgtgtcatcaaaaatatactccattaaaatgattattccggcagcgaacttgatattggatatatcacaacctttgttaatatctacgacaatagacagcagtcccatggttccataaacagtgagtttatctttctttgaagagatattttgtagagatcttataaaactgtcgaatgacatcgcatttatatctttagctaaatcgtatatgttaccatcgtaatatctaaccgcgtctatcttaaacgtttccatcgctttaaagacgtttccgatagatggtctcatttcatcagtcatactgagccaacaaatataatcgtgtataacatctttgatagaatcagactctaaagaaaacgaatcggctttattatacgcattcatgataaacttaatgaaaaatgtttttcgttgtttaagttggatgaatagtatgtcttaataattgttattatttcattaattaatatttagtaacgagtacactctataaaaacgagaatgacataactagttatcaaagtgtctaggacgcgtaattttcatatggtatagatcctgtaagcattgtctgtattctggagctattttctctatcgcattagtgagttcagaatatgttataaatttaaatcgaataacgaacataactttagtaaagtcgtctatattaactcttttattttctagccatcgtaataccatgtttaagatagtatattctctagttactacgatctcatcgttgtctagaatatcacatactgaatctacatccaattttagaaattggtctgtgttacatatctcttctatattattgttgatgtattgtcgtagaaaactattacgtagaccattttctttataaaacgaatatatagtactccaattatctttaccgatatatttgcacacataatccattctctcaatcactacatctttaagattttcgttgttaagatatttggctaaactatataattctattagatcatcaacagaatcagtatatatttttctagatccaaagacgaactctttggcgtcctctataatattcccagaaaagatattttcgtgttttagtttatcgagatctgatctgttcatatacgccatgattgtacggtacgttatgataaccgcataaaataaaaatccattttcatttttaaccaatactattcataattgagattgatgtaatactttgttactttgaacgtaaagacagtacacggatccgtatctccaacaagcacgtagtaatcaaatttggtgttgttaaacttcgcaatattcatcaatttagatagaaacttatactcatcatctgttttaggaatccatgtattattaccactttccaacttatcattatcccaggctatgtttcgtccatcatcgttgcgcagagtgaataattcttttgtattcggtagttcaaatatatgatccatgcatagatcggcaaagctattgtagatgtgatttttcctaaatctaatataaaactcgtttactagcaaacactttcctgatttatcgaccaagacacatatggtttctaaatctatcaagtggtggggatccatagttatgacgcagtaacatatattattacattcttgactgtcgctaatatctaaatatttattgttatcgtattggattctgcatatagatggcttgtatgtcaaagatatagaacacataaccaatttatagtcgcgctttacattctcgaatctaaagttaagagatttagaaaacattatatcctcggatgatgttatcactgtttctggagtaggatatattaaagtctttacagatttcgtccgattcaaataaatcactaaataatatcccacattatcatctgttagagtagtatcattaaatctattatattttatgaaagatatatcactgctcacctctatatttcgtacatttttaaactgtttgtataatatctctctgatacaatcagatatatctattgtgtcggtagacgataccgttacatttgaattaatggtgttccattttacaacttttaacaagttgaccaattcatttctaatagtatcaaactctccatgattaaatattttaatagtatccattttatatcactacggacacaaagtagctgacataaaccattgtataatttttatgttttatgtttattagcgtacacattttggaagttccggcttccatgtatttcctggagagcaagtagatgatgaggaaccagatagtttatatccgtacttgcacttaaagtctacattgtcgttgtatgagtatgatcttttaaacccgctagacaagtatccgtttgatattgtaggatgtggacatttaacaatctgacacgtgggtggatcggaccattctcctcctgaacacaggacaccagagttaccaatcaacgaatatccactattgcaactataagttacaacgcttccatcggtataaaaatcctcgtatccgttatgtcttccgttggatatagatggaggggattggcatttaacagattcacaaataggtgcctcgggattccataccatagatccagtagatcctaattcacaatacgatttagattcaccgatcaaatgatatccgctattacaagagtacgttatactagagccaaagtctactccaccaatatcaagttggccattatcgatatctcgaggcgatgggcatctccgtttaatacattgattaaagagtgtccatccagtacctgtacatttagcatatataggtcccattttttgctttctgtatccaggtagacatagatattctatagtgtctcctatgttgtaattagcattagcatcagtctccacactattcttaaatttcatattaatgggtcgtgacggaatagtacagcatgatagaacgcatcctattcccaacaatgtcaggaacgtcacgctctccaccttcatatttatttatccgtaaaaatgttatcctggacatcgtacaaataataaaaagcccatatatgttcgctattgtagaaattgtttttcacagttgctcaaaaacgatggcagtgacttatgagttacgttacactttggagtctcatctttagtaaacatatcataatattcgatattacgagttgacatatcgaacaaattccaagtatttgattttggataatattcgtattttgcatctgctataattaagatataatcaccgcaagaacacacgaacatctttcctacatggttaaagtacatgtacaattctatccatttgtcttccttaactatatatttgtatagataattacgagtctcgtgagtaattccagtaattacatagatgtcgccgtcgtactctacagcataaactatactatgatgtctaggcatgggagacttttttatccaacgatttttagtgaaacattccacatcgtttaatactacatatttttcatacgtggtataaactccacccattacatatatatcatcgtttacgaataccgacgcgcctgaatatctaggagtaattaagtttggaagtcttatccatttcgaagtgccgtgtttcaaatattctgccacacccgttgaaatagaaaattctaatcctcctattacatataactttccatcgttaacacaagtactaacttctgattttaacgacgacatattagtaaccgttttccattttttcgtttcaagatctacccgcgatacggaataaacatgtctattgttaatcatgccgccaataatgtatagacaattatgtaaaacatttgcattatagaattgtctatctgtattaccgactatcgtccaatattctgtcctaggagagtaatgggttattgtggatatataatcagagtttttaatgactactatattatgttttataccatttcgtgtcactggctttgtagatttggatatagttaatcccaacaatgatatagcattgcgcatagtattagtcataaacttgggatgtaaaatgttgatgatatctacatcgtttggatttttatgtatccactttaataatatcatagctgtaacatcctcatgatttacgttaacgtcttcgtgggataagatagttgtcagttcatcctttgataattttccaaattctggatcggatgtcaccgcagtaatattgttgattatttctgacatcgacgcattatatagttttttaattccatatcttttagaaaagttaaacatccttatacaatttgtggaattaatattatgaatcatagtttttacacatagatctactacaggcggaacatcaattattacggcagcaactagtatcatttctacattgtttatggtgatgtttatcttcttccagcgcatatagtctaatagcgattcaaacgcgtgatagtttataccattcaatataatcgcttcatcctttagatggtgatcctgaatgcgtttaaaaaaattatacggagacgccgtaataatttccttattcacttgtataatttccccattgatagaaaatatcacgctttccattcttgaagtactataagtaattatagtataatgtaaaggtttatatattcaatattttttataaaaaaatcatttcgacattaattcctttttaaatttgcgtctatcatctatagaaacatattctatgaatttataaaatgcttttacgtgtcctatcgtaggcgatagaaccgctaaaaagcctatcgaatttctacaaaagaatctgttatatggtatagggagagtataaaacattaaatgtccgtacttattaaagtattcagtagccaatcctaactctttcgaatacttattaatggctcttgttctgtacgaatctatttttttgaacaacggacctagtggtatatcttgttctatgtatctaaaataatgtctgactagatccgttagtttaatatcctcagtcatcttgtctagaatggcaaatctaactgcgggtttaggctttagtttagtttctatatctacatctatgtctttatctaacaccaaaaatataatagctaatattttattacaatcatccggatattcttctacgatctcactaactaatgtttctttggttatactagtatagtcactatcggacaaataaagaaaatcagatgatcgatgaataatacatttaaattcatcatctgtaagatttttgagatgtctcattagaatattattagggttagtactcattatcattcggcagctattacttattttattatttttcaccatatagatcaatcattagatcatcaaaatatgtttcaatcatcctaaagagtatggtgaatgactcttcccatctaatttctgaacgttcaccaatgtctctagccactttggcactaatagcgatcattcgcttagcgtcttctatattattaactggttgattcaatctatctagcaatggaccgtcggacagcgtcattctcatgttcttaatcaatgtacatacatcgccgtcatctaccaattcatccaacaacataagctttttaaaatcatcattataataggtttgatcgttgtcatttctccaaagaatatatctaataagtagagtcctcatgattagttaacaactattttttatgttaaatcaattagtacaccgctatgtttaatacttattcatattttagtttttaggattgagaatcaatacaaaaattaatgcatcattaattttagaaatacttagtttccacgtagttaatgaaacatttgaactcatcgtacaggacgttctcgtacaggacgtaactataaaccggtttatatttgttcaagatagatacaaatccgataactttttttacgaattctacgggatccactttaaaagtgtcatacggggttctttttatttttttaaacagatcaatggtgtgatgttgattaggtcttttacgaatttgatatagaatagcgtttacatattctccataatggtcaatcgccatttgttcgtatgtcataaattctttaattatatgacactgtgtattgtttagttcatccttgttcattgttaggaatctattcaaaatggcaattatactagaactataggtgcgttgtatacacatattgatgtgtctgtttatacaatccatgatatttggatccatgctactaccttcgggtaaaattgtagcatcatataccatttctagtactttaggttcattgttatccattgcagaggacgtcatgatcgaatcataaaaaaatatattatttttatgttattttgttaaaaataatcatcgaatacttcgtaagatactccttcatgaacataatcagttacaaaacgtttatatgaagtaaagtatctacgatttttacaaaagtccggatgcataagtacaaagtacgcgataaacggaataataatagatttatctagtttatctttttctatagctttcatagttagatacatggtctcagaagtaggattatgtaacatcagcttcgataaaatgactgggttatttagtcttacacattcgctcatacatgtatgaccgttaactacagagtctacactaaaatgattgaacaatagatagtctaccattgtttcgtattcagatagtacagcgtagtacatagcatcttcacaaattatatcattgtctaatagatatttgacgcatcttatggatcccacttcaacagccatcttaaaatcggtagaatcatattgctttcctttatcattaataatttctagaacatcatctctatcataaaagatacaaatattaactgtttgatccgtaataacattgctagtcgatagcaatttgttaataagatgcgctgggctcaatgtcttaataagaagtgtaagaggactatctccgaatttgttttgtttattaacatccgttgatggaagtaaaagatctataatgtctacattcttgactgttttagagcatacaatatggagaggtgtatttccatcatgatctggttttgagggactaattcctagtttcatcatccatgagattgtagaagcttttggattgtctgacataagatgtctatgaatatgatttttgccaaatttatccactatcctggcttcgaatccgatggacattatttttttaaacactctttctgaaggatctgtacacgccaacaacggaccacatccttcttcatcaaccgagttgttaatcttggctccatactgtaccaataaatttattctctctatgacttcatcatctgttcccgagagataatatagaggtgttttattatgtttatcacacgcgtttggatctgcgccgtgcgtcagcagcatcgcgactattctattattattaattttagaagctatatgcaatggataatttccatcatcatccgtctcatttggagagtatcctctatgaagaagttcttcgacaaatcgttcatctagtcctttaattccacaatacgcatgtagaatgtgataattatttccagaaggttcgatagcttgtagcatattcctaaatacatctaaatttttactattatatttggcataaagagatagataatactcggccgacataatgttgtccattgtagtataaaaattaatatttctatttctatttctgtatatttgcaacaatttactctctataacaaatatcataacttagttcttttatgtcaagaaggcactggtttagttcatctataaatgtcacgccataactaccacgcatgccatactcagaattatgataaagatatttatccttggggtgtaggtaatggggattaatctttgttggatcagtctctaagttaacacatgtcacacatgatccatttatagttatatcacacgatgatgatttatgaattgattccggaagatcgctatcgtattttgtggttccacaattcatttccatacatgttattgtcacactaatattatgatgaactttatctagccgctgagtggtaaacaacagaacagatagtttattatctttaccaacaccctcagccgctgccacaaatctctgatccgtatccatgatggtcatgtttatttctagtccgtatccagtcaacactatgttagcatttctgtcgatatagctttcactcatatgacactcaccaataatagtagaattaatgtcgtaatttacaccaatagtgagttcggcggcaaagtaccaataccggtaatcttgtcgaggaggacatatagtattcttgtattctaccgaatacccgagagatgcgatacaaaagagcaagactaatttgtaaaccatcttactcaaaatatgtaacaatagtacgatgcaatgagtaagacaataggaaatctatcttatatacacataattattctatcaattttaccaattagttagtgtaatgttaacaaaaatgtgggagaatctaattagtttttctttacacaattgacgtacatgagtctgagttccttgtttttgctaattatttcatccaatttattattcttgacgatatcgagatcttttgtataggagtcagacttgtattcaacatgcttttctataatcatcttagttatttcggcatcatccaatagtacattttccagattaacagagtagatattaatgtcgtatttgaacagagcctgtaacatctcaatgtctttattatctatagccaatttaatgtccggaatgaagagaagggaattattggtgtttgtcgacgtcatatagtcgagcaagagaatcatcatatccacgtgtccattttttatagtggtgtgaatacaactaaggagaatagccagatcaaaagtagatggtatttctgaaagaaagtatgatacaatacttacatcattaagcatgacggcatgataaaatgaagttttccatccagttttcccatagaacatcagtctccaatttttcttaacaaacagtttcaccgtttgcatgttaccactatcaaccgcataatacaatgcggtgtttcctttgtcatcaaattgtgaatcatccattccactgaatagcaaaatctttactattttggtatcttctaatgtggctgcctgatgtaatggaaattcattctctagaagatttttcaatgctccagcgttcaacaacgtacatactagacgcacgttattatcagctattgcataatacaaggcactatgtccatggacatccgccttaaatgtatctttactagagagaaagcttttcagctgcttagacttccaagtattaattcgtgacagatccatgtctgaaacgagacgctaattagtgtatattttttcattttttataattttgtcatattgcaccagaattaataatatctctaatagatctgattagtagatacatggctatcgcaaaacaacatatacacatttaataaaaataatatttattaagaaaattcagatttcacgtacccatcaatataaataaaataatgattccttccaccgtatccataaacaatattaaggagattctaccttacccataaacaatataaatccagtaatatcatgtctaatgatgaacacaaatggtgtattaaattccagtttttcaggagatgatctcgccgtagctaccatgatagtagatgcctctgctacagttccttgttcgtcgacatctatctttgcattctgaaacattttataaatatataatgggtccctagtcatatgtttaaacgacgcattatctggattaaacatactaggagccatcatttcggctatcgacttaatatccctcttattttcgatagaaaatttagggagtttaagattgtacactttattccctaattgaaacgaccaatagtctaattttgcagccgtaatagaatctgtgaaatgggtcatattatcacctattgccaggtacatactaatattagcatccttatacggaaggcgcaccatatcatattcttcgtcatcgattgtgattgtatttccttgcaatttagtaactacgttcatcatgggaaccgttttcgtaccgtacttattagtaaaactagcattgcgtgttttagtgatatcaaacggatattgccatgtacctttaaaatatatagtattaatgattgcccatagagtattattgtcgagcatattagaatctactacattagacataccggatctacgttctactatagaattaattttattaaccgcatctcgtctaaagtttaatctatataggccgaatctatgatattgttgataatacaacggtttaatgcacacagtattatctacgaaactttgataagttagatcagtgtacgtatatttagatgttttcagcttagctaatcctgatattaattctgtaaatgctggacccagatctctttttctcaaatccatagtcttcaataattctattctagtattacctgatgcaggcaatagcgacataaacatagaaaacgaataaccaaacggtgagaagacaatattatcatcttgaatatttttatacgctactataccggcattggtaaatccttgcagacgataggtagacactgaacacgttaacgatagtatcaataacgcaatcatgattttatggtattaataattaaccttatttttatgttcggtataaaaattattgatgtctacacatccttttgtaattgacatctatatatccttttgtataatcaactctaatcactttaacttttacagttttccctaccagtttatccctatattcaacatatctatccatatgcatcttaacactctctgccaagatagcttcagagtgaggatagtcaaaaagataaatgtatagagcataatccttctcgtatactctgccctttattacatcgcccgcattgggcaacgaataacaaaatgcaagcatcttgttaacgggctcgtaaattgggataaaaattatgtttttatatctattttattcaagagaatattcaggaatttctttttccggttgtatctcatcgcagtatatatcatttgtacattgtttcatattttttaatagtttacaccttttagtaggactagtatcgtacaattcatagctgtattttgaattccaatcacgcataaaaatatcttccaattgttgacgaagacctaatccatcatccggtgtaatattaatagatgctccacatgtatccgtaaagtaatttcctgtccaatttgaggtacctatataggccgttttatcggttaccatatatttggcatggtttaccctagaatacggaatgggaggatcagcatctggtacaataaatagctttacttctatatctatgtttttagattttagcatagcgatagatcttaaaaagtttctcatgataaacgaagatcgttgccagcaactaatcaatagcttaacggatacttgtctgtctatagcggatcttcttaattcatcttctatataaggccaaaacaaaattttacccgccttcgaataaataatagggataaagttcataacagatacataaacgaatttactcgcatttctaatacatgacaataaagcggttaaatcattggttctttccatagtacatagttgttgcggtgcagaagcaataaatacagagtgtggaacaccacttacgttaatactaagaggatgatctgtattataatacgacggataaaagtttttccaattatatggtagattgttaactccaagataccagtatacctcaaaaatttgagtgagatccgctgccaagttcctattattgaagatcgcaatacccaattctttgacctgagttagtgatctccaatccatgttagcgcttcctaaataaatatgtgtattatcagatatccaaaattttgtatgaagaactcctcctaggatatttgtaatatctatgtatcgtacttcaactccggccatttgtagtctttcaacatcctttaatggtttgttagatttattgacggctactctaactcgtactcctcttttgggtaattgtacaatctcgtttaatattatcgtgccgaaattcgtacccacttcatccgataaactccaataaaaagatgatatatctagtgtttttgtggtattggatagaatttccctccacatgttaaatgtagacaaatatactttatcaaattgcatacctataggaatagtctctgtaatcactgcgattgtattatccggattcattttatttgttaaaagaataatcctatatcacttcactctattaaaaatccaagtttctatttctttcatgactgattttttaacttcatccgtttccttatgaagatgatgtttggcaccttcataaatttttatttctctattacaatttgcatgttgcatgaaataatatgcacctgaaacatcactaatctcattgtttgttccctggagtatgagagtcggggggtgttaatcttggaaattatttttctaaccttgttggtagccttcaagacctgactagcaaatccagccttaattttttcatgattgattaatgggtcgtattggtatttataaactttatccatatctctagatactgattctggacatagctttccgactggcgcatttggtgtgatggttcccataagtttggcagctagcagattcagtcttgaaacagcatctgcattaactagaggagacattagaatcattgctgtaaacaagtttggattatcgtaagaggctagtatagaaattgttgctcccatggaatgacccaataagtagatttaatagttaccacgtgctgtaccaaagtcatcaatcatcattttttcaccattacttcttccatgtccaatatgatcatgtgagaatactaaaattcctaacgatgatatgttttcagctagttcgtcataacgtccagaatgtttaccagctccatgacttatgaatactaatgccttaggatatgtaataggtttccaatatatgtaatcattgtccagattgaacatacagtttgcactcatgattcacgttatataactatcaatattaacagttcgtttgatgatcatattatttttatgttttattgataattgtaaaaacatacaattaaatcaatatagaggaaggagacggatactgtcttttgtgagatagtcatggcgactaaattagattatgaggatgctgttttttactttgtggatgatgataaaatatgtagtcgcgactccatcatcgatctaatagatgaatatattacgtggagaaatcatgttatagtgtttaacaaagatattaccagttgtggaagactgtacaaggaattgatgaagttcgatgatgtcgctatacggtactatggtattgataaaattaatgagattgtcgaagctatgagcgaaggagaccactacatcaattttacaaaagtccatgatcaggaaagtttattcgctaccataggaatatgtgctaaaatcactgaacattggggatacaaaaagatttcagaatctagattccaatcattgggaaacattacagatctgatgaccgacgataatataaacatcttgatactttttctagaaaaaaaattgaattgatgatataggggtcttcataacgcataattattacgttagcattctatatccgtgttaaaaaaaattatcctatcatgtatttgagagttttatatgtagcaaacatgatagctgtgatgccaataagctttagatattcacgcgtgctagtgttagggatggtattatctggtggtgaaatgtccgttatataatctacaaaacaatcatcgcatatagtatgcgatagtagagtaaacatttttatagtttttactggattcatacatcgtctacccaattcggttataaatgaaattgtcgccaatcttacacccaaccccttgttatccattagtatagtattaacttcgttatttatgtcataaactgtaaatgattttgtagatgccatatcatacatgatattcatgtccctattataatcattactaactttatcacaatatatgttgataatatctatatatgatctagtctttgtgggcaactgtctatacaagtcgtctaaacgttgtttactcatatagtatcgaacagccatcattacatggtcccgttccgttgatagataatcgagtatgttagtggacttgtcaaatctatataccatattttctggaagtggatatacatagtcgtgatcaacattattgctagcctcatcttctatatcctgtactataccattatctatatcatctacataatctacgatattattacacataaacatcgacaacatactattgtttattatctaagtcctgttgatccaaacccttgatctcctctatttgtactatctagagattgtacttcttccagttctggataatatatacgttgatagattagctgagctattctatctccagtatttacattaaacgtacattttccattattaataagaatgactcctatgtttcccctataatcttcgtctattacaccacctcctatatcaatgccttttagtgacagaccagacctaggagctattctaccatagcaaatcttaggcatggacatactaatatctgtcttaattaactgtctttctcctggagggatagtataatcgtaagcgctatacaaatcatatccggcagcacccggcgattgcctagtaggagatttagctctgttagtttccttaacaaatctaactggtgagttaatattcatgttgaacataaaactaatattttatttcaaaattatttaccatcccatatattccatgaataagtgtgatgattgtacacttctatagtatctatatacgatccacgataaaatcctcctatcaatagcagtttattatccactatgatcaattctggattatccctcggataaataggatcatctatcagagtccatgtattgctggattcacaataaaattccgcatttctaccaaccaagaataaccttctaccgaacactaacgcgcatgatttataatgaggataataagtggatggtccaaactgccactgatcatgattgggtagcaaatattctgtagttgtatcagtttcagaatgtcctcccattacgtatataacattgtttatggatgccactgctggattacatctaggtttcagaagactcggcatattaacccaagcagcatccccgtggaaccaacgctcaacagatgtgggatttggtagacctcctactacgtataatttattgttagcgggtatccccgtagcatacagtctggggctattcatcggaggaattggaatccaattgtttgatatataatttacagctatagcattgttatgtatttcattgttcatccatccaccgatgagatatactacttctccaacatgagtacttgtacacatatggaatatatctataatttgatccatgttcataggatactctatgaatggatacttgtatgatttgcgtggttgtttatcacaatgaaatattttggtacagtctagtatccattttacattatttatacctctgggagaaagataatttgacctgattacatttttgataaggagtagcagatttcctaatttatttcttcgctttatataccacttaatgacaaaatcaactacataatcctcatctggaacatttagttcatcgctttctagaataagtttcatagatagataatcaaaattgtctatgatgtcatcttccagttccaaaaagtgtttggcaataaagtttttagtatgacataagagattggatagtccgtattctatacccatcatgtaacactcgacacaatattcctttctaaaatctcgtaagataaagtttatacaagtgtagatgataaattctacagaggttaatatagaagcacgtaataaattgacgacgttatgactatctatatatacctttccagtatacgagtaaataactatagaagttaaactgtgaatgtcaaggtctagacaaacccttgtaactggatctttatttttcgtgtatttttgacgtaaatgtgtgcgaaagtaaggagataactttttcaatatcgtagaattgactattatattgccacctatagcatcaataattgttttgaatttcttagtcatagacaatgctaatatattcttacagtacacagtattgacaaatatcggcatttatgtttctttaaaagtcaacatctaaagaaaaatgattatcttcttgagacataactcccattttttggtattcacccacacgtttttcgaaaaaattagtttttccttccaatgatatattttccatgaaatcaaacggattggtaacattataaatttttttaaatcccaattcagaaatcaatctatccgcgacaaattctatatatgttttcatcatttcacaattcattcctataagtttaactggaagagccgcagtaagaaattcttgttcaatggatactgcatctgttataatagatctaacggtttcttcactcggtggatacaataaatgtttaaacatcaaacatgcgaagtcgcagtgcagaccctcgtctctactaattagttcgttggaaaacgtgagtccgggcattaggccacgctttttaagccaaaatatggaagcgaatgatccggaaaagaagattccttctactgcagcaaaggcaataagtctctctccataaccggcgctgtcatgtatccacttttgagcccaatcggccttcttttttacacaaggcattgtttctatggcattaaagagatagtttttttcattactatctttaacataagtatcgatcaaaagactatacatttccgaatgaatgttttcaatggccatctgaaatccgtagaaacatctagcctcggtaatctgtacttctgtacaaaatcgttccgccaaattttcattcactattccgtcactggctgcaaaaaacgccaatacatgttttataaaatatttttcgtctggtgttagtttattccaatcattgatatctttagatatatctacttcttccactgtccaaaatgatgcctctgcctttttatacatgttccagatgtcataatattggattgggaaaataacaaatctatttggatttggtgcaaggatgggttccataactaaattaacaatatcaataaattttttttcagttatctatatgcctgtacttggattttttgtacatcgatatcgccgcaatcactacaataattacaagtattattgatagcattgttattagtactatcataattaaattatcgacattcatgggtgctgaataatcgttattatcatcattatcattttgtaattgtgacatcatactagataaatcgtttgcgagattgttgtgggaagcgggcatggaggatgcattatcattattatttaacgccttccattcggattcacaaatatggcgcgcgttcaacattttatggaaactataattttgtgaaaacagataacaagaaaactcgtcatcgttcaaatttttaacgatagtaaaccgattaaacgtcgagctaatttctaacgctagcgactctgttggatatgggtttccagatatatatcttttcagttcccctacgtatctataatcatctgtaggaaatggaagatatttccatttatctactgttcctaatatcatatgtggtggtgtagtagaaccattaagcgcgaaagatgttatttcgcatcgtattttaacttcgcaataatttctggttagataacgcactctaccagtcaagtcaatgatattagcctttacagatatattcatagtagtcgtaacgatgactccatcttttagatgcgatactcctttgtatgtaccagaatcttcgtacctcaaactcgatatatttaaacaagttaatgagatattaacgcgttttatgaatgatgatatataaccagaagttttatcctcggtggctagcgctataaccttatcattataataccaactagtgtgattaatatgtgacacgtcagtgtgggtacaaatatgtacattatcgtctacgtcgtattcgatacatccgcatacagccaacaaatataaaatgacaaatactctaacgacgttcgtacccatcttgatgcggtttaataaatgttttgatttcaatttattgtaaaaaaagattcggttttatactgttcgatattctcattgcttatattttcatctatcatctccacacagtcaaatccgtggttagcatgcacctcatcaaccggtaaaagactatcggactcttctatcattataactctagaatatttaatttggtcattattaatcaagtcaattatcttatttttaacaaacgtgagtattttactcattttttataaaaacttttagaaatatacagactctatcgtgtgtctatatcttctttttatatccaatgtatttatgtctgatttttcttcatttatcatatataatggtccaaattctacacgtgcttcggattcatccagatcattaaggttcttataattgtaacatccttctcttccctcttctacatcttccttcttattcttattcttattcttattcttattcttattcttattcttattcttagcgtcacagaatctaccacagcagaatcccatgacgagcgtcatattaaactaattcattttcaattataatatacgattagtaatgaccattaaaataaaaaatattcttcataaccggcaagaaagtgaaaagttcacattgaaactatgtcagtagtatacatcatgaaatgatgatatatatattctctattttggtggaggattatatgatataattcgtggataatcattcttaagacacatttcttcattcgtaaatcttttcacgttaaatgagtgtccatattttgcaatttcttcatatgatggcggtgtacgtggacgaggctgctcctgttcttgttgtggtcgccgactatcgtgtttgcgtttagatccctccattatcgcgattgcgtagatggagtactattttataccttgtaattaaatttttttattaattaaacgtataaaaacgttccgtatctgtatttaagagccagatttcgtctaatagaacaaatagctacagtaaaaataactagaataattgctacacccactagaaaccacggatcgtaatacggcaatcggttttcgataataggtggaacgtatattttatttaaggacttaacaattgtctgtaaaccacaatttgcttcagcggatcctgtattaactatctgtaaaagcatatgttgaccgggcggagccgaacattctccgatatctaatttctgtatatctataatattattaacctccgcatacgcattacagttcttttctagcttggataccgcactaggtacatcgtctagatctattcctatttcctcagcgatagctcttctatccttttccggaagcaatgaaatcacttcaataaatgattcaaccatgagtgtgaaactaagtctagaattactcatgcatttgttagttattcggagcgcgcaatttttaaactgtcctataacctctcctatatgaatagcacaagtgacattagtagggatagaatgttgagctaatttttgtaaataactatctataaaaagattatacaaagttttaaactctttagtttccgccatttatccagtctgagaaaatgtctctcataataaatttttccaagaaactaattgggtgaagaatggaaacctttaatctatatttatcacagtctgttttggtacacatgatgaattcttccaatgccgtactaaattcgatatctttttcgatttctggatatgtttttaataaagtatgaacaaagaaatggaaatcgtaataccagttatgtttaactttgaaattgttttttattttcttgttaatgattccagccacttgggaaaagtcaaagtcgtttaatgccgatttaatacgttcattaaaaacaaactttttatcctttagatgaattattattggttcattggaatcaaaaagtaagatattatcgggtttaagatctgcgtgtaaaaagttgtcgcagcatggtagttcgtagattttaatgtataacagagccatctgtaaaaagataaactttatgtattgtaccaaagatttaaatcctaatttgatagctaactcggtatctactttatctgccgaatacagtgctaggggaaaaattataatgtttcctctttcatattcgtagttagttctcttttcatgttcgaaaaagtgaaacatgcggttaaaatagtttataacattaatattactgttaataactgccgggtaaaagtgggatagtaatttcacgaatttgatactgtcctttctctcgttaaacgcctttagaaaaactttagaagaatatctcaatgagagttcctgaccatccatagtttgtatcaataatagcaacatatgaagaacacgtttatacagagtatgtaaaaatgttaatttatagtttaatcccatggcccacgcacacacgattaattttttttcatctccctttagattgttgtatagaaatttgggtactgtgaactccgccgtagtttccatgggactatataattttgtggcctcgaatacaaattttactacatagttatctatcttaaaaactataccatatcctcctgtagatatgtgataaaaatcgtcgtttataggataaaatcgtttatccttttgttggaaaaatgatgaattaatgtaatcattctcttctatctttagtagtgtttccctattaaaattcttaaaataatttaacaatctaactgacggagcccaattttggtgtaaatctaattgggacattatgttgttaaaatataaacagtctcctaatataacagtatctgataatctatggggagacatccattgatattcaggggatgaatcattggcaacacccatttattgtacaaaaagccccaatttacaaacgaaagtccaggtttgatagagacaaactattaactattttgtctctgtttttaacacctccacagtttttaatttctttggtaatgaaattattcacaatatcagtatcttctttatctaccagagattttactaacttgataaccttggctgtctcattcaatagggtagtaatatttgtatgtgtgatattgatatctttttgaattgtttcttttagaagtgattctttgatggtgtcagcatacgaattacaataatgcagaaactcggttaacatgcaggaattatagtaagccaattccaattgttgcctgtgttgtattagagtgtcaatatgagcaatggtgtccttgcgtttctctgatagaatgcgagcagcgattttggcgttatcatttgacgatatttctggaatgacgaatcctgtttctactaactttttggtaggacaaagtgaaacaatcaagaagatagcttctcctcctatttgtggaagaaattgaactcctctagatgatctactgacgatagtatctccttgacagatattggaccgaattacagaagtacctggaatgtaaagccctgaaaccccctcattttttaagcagattgttgccgtaaatcctgcactgtgaccaagatagagagctcctttggtgaatccatctctatgtttcagtttaaccaagaaacagtcagctggtctaaaatttccatctctatctaatacagcatctaacttgatgtcaggaactatgaccggtttaatgttatatgtaacattgagtaaatccttaagttcataatcatcactgtcatcagttatgtacgatccaaacaatgtttctaccggcatagtggatacgaagatgctatccatcagaatgtttccctgattagtattttctatatagctattcttctttaaacgattttccaaatcagtaactatgttcatttttttaggagtaggacgcctagccagtatggaagaggattttctagatcctctcttcaacatctttgatctcaatggaatgcaaaaccccatagtgaaacaaccaacgataaaaataatattgtttttcactttttataattttaccatctgactcatggattcattaatatctttataagagctactaacgtataattctttataactgaactgagatatatacaccggatctatggtttccataattgagtaaatgaatgctcggcaataactaatggcaaatgtatagaacaacgaaattatactagagttgttaaagttaatattttctatgagctgttccaataaattatttgttgtgactgcgttcaagtcataaatcatcttgatactatccagtaaaccgtttttaagttctggaatattattatcccattgtaaagcccctaattcgactatcgaatatcctgctctgatagcagtttcaatatcgacggacgtcaatactgtaataaaggtggtagtattgtcatcatcgtgataaactactggaatatggtcgttagtaggtacggtaactttacacaacgcgatatataactttccttttgtaccatttttaacgtagttgggacgtcctgcagggtattgttttgaagaaatgatatcgagaacagatttgatacgatatttgttggattcctgattatttactataatataatctagacagatagatgattcgataaatagagaaggtatatcgttggtaggataatacatccccattccagtattctcggatactctattaatgacactagttaagaacatgtcttctattctagaaaacgaaaacatcctacatggactcattaaaacttctaacgctcctgattgtgtctcgaatgcctcgtacaaggatttcaaggatgccatagattctttgaccaacgatttagaattgcgtttagcatctgatttttttattaaatcgaatggtcggctctctggtttgctaccccaatgataacaatagtcttgtaaagataaaccgcaagaaaatttatacgcatccatccaaataaccctagcaccatcggatgatattaatgtattattatagattttccatccacaattattgggccagtatactgttagcaacggtatatcgaatagattactcatgtaacctactagaatgatagttcgtgtactagtcataatatctttaatccaatctaagaaatttaaaattagattttttacactgttaaagttaacaaaggtattacccgggtacgtggatatcatatatggtattggtccattatcagtaatagctccataaactgatacggcgatggtttttatatgtgtttgatctaacgaggaagaaattcgcacccacaattcatctctagatatgtatttaatatcaaacggtaacacatcaatttcgggacgcgtatatgtttctaaatttttaatccaaatataatgatgacctatatgccctattatcatactgtcaactatagtacacctagagaacttacgatacatctgtttcctataatcgttaaattttacaaatctataacatgctaaaccttttgacgacaaccattcattaatttctgatatggaatctgtattctcgataccgtattgttctaaagccagtgctatatctccctgttcgtgggaacgctttcgtataatatcgatcaacggataatctgaagtttttggagaataatatgactcatgatctatttcgtccataaacaatctagacataggaattggaggcgatgatcttaattttgtgcaatgagtcgtcaatcctataacttctaatcttgtaatattcatcatcgacataatactatctatgttatcatcgtatattagtataccatgaccttcttcatttcgtgccaaaatgatatacagtcttaaatagttacgcaatatctcaatagtttcataattgttagctgttttcatcaagatttgtaccctgtttaacatgatggcgttctatacgtttctattttctattttttaaatttttaaatttttaacgatttactgtggctagatacccaatctctctcaaatatttttttagcctcgcttacaagctgtttatctatactattaaaactgacgaatccgtgattttggtaatgggttccgtcgaaatttgccgaagtgatatgaacatattcgtcgtcgactatcaacaattttgtattattctgaatagtgaaaaccttcacagatagatcattttgaacacacaacgcgtctagacttctggcggttgccatagaatatacgtcgttcttatcccaattaccaactagaagtctgatcttaactcctctattaatggctgcttctataatggagttgtaaatatcgggccaatagtagctattaccgtcgacacgtgtagtgggaactatggccaaatgttcaatatctatactagtcttagctgacctgagtttatcaataactacatcggtatctagatctctagaatatcccaataggtgttccggagaatcagtaaagaacactccacctataggattcttaatatgatacgcagtgctaactggcagacaacaagccgcagagcataaattcaaccatgaattttttgcgctattaaaggctttaaaagtatcaaatcttctacgaagatctgtggccagcgggggataatcagaatatacacctaacgttttaatcgtatgtatagatcctccagtaaatgacgcgtttcctacataacatctttcatcatctgacacccaaaaacaaccgagtagtagtcccacattattttttttatctatattaacggttataaaatttatatccgggcagtgactttgtagctctcccagatttcttttccctcgttcatctagcaaaactattattttaatccctttttcagatgcctcttttagtttatcaaaaataagcgctcccctagtcgtactcagaggattacaacaaaaagatgctatgtatatatatttcttagctagagtgataatttcgttaaaacattcaaatgttgttaaatgatcggatctaaaatccatattttctggtagtgtttctaccagcctacattttgctcccgcaggtaccgatgcaaatggccacatttagttaacataaaaacttatacatcctgttctatcaacgattctagaatatcatcggctatatcgctaaaattttcatcaaagtcgacatcacaacctaactcagtcaatatattaagaagttccatgatgtcatcttcgtctatttctatatccgtatccattgtagattgttgaccgattatcgagtttaaatcattactaatactcaatccttcagaatacaatctgtatttcattgtaaatttataggcggtgtatttaagttggtagattttcaattatgtatcaatatagcaacagtagttcttgctcctccttgattctagcatcctcttcattattttcttctacgtacataaacatgtccaatacgttagacaacacaccgacgatggcggccgccacagacacgaatatgactagaccgatgaccatttaaaaacccctctctagctttcacttaaactgtatcgatcattcttttagcacatgtataatataaaaaaacattattctatttcgaatttaggcttccaaaaatttttcatccgtaaaccgataataatatatatagacttgttaatagtcggaataaatagattaatgcttaaactatcatcatctccacgattagagatacaatatttacattctttttgctgtttcgaaactttatcaatacacgttaatacaaacccaggaaggagatattgaaactgaggctgttgaaaatgaaacggtgaatacaataattcagataatgtaaaatcatgattccgtattctgatgatattagaactgctaatggatgtcgatggtatgtatctaggagtatctattttaacaaagcatcgatttgctaatatacaattatcattttgattaattgttattttattcatattcttaaaaggtttcatatttatcaattcttctacattaaaaatttccatttttaatttatgtagccccgcaatactcctcattacgtttcattttttgtctataatatccattttgttcatctcggtacatagattatccaattgagaagcgcatttagtagttttgtacattttaagtttattgacgaatcgtcgaaaactagttatagttaacattttattatttgataccctgatattaatacccctgccgttactattatttataactgatgtaacccacgtaacattggaattaactatcgatagtaatgcatcgacgcttccaaaattgtctattataaactcaccgataatttttttattacatgttttcatattcattaggattatcaaatctttaatcttactacgattgtatgcgttgatattacaagacgtcattctaaaagacggaggatttccatcaaatgccagacaatcacgtacaaagtacatggaaataggttttgttctattgcgcatcatagattcatatagaacacccgtagaaatactaatttgttttactctataaaatactaatgcatctatttcatcgttttgtataacgtctttccaagtgtcaaattccaaatttttttcattgatagtaccaaattcttctatctctttaactacttgcatagataggtaattacagtgatgcctacatgccgttttttgaaactgaatagatgcgtctagaagcgatcgtacgctagtcacaatcaccactttcatatttagaatatatgtatgtaaaaatatagtagaatttcattttgtttttttctatgctataaatgaattctcattttgcatctgctcatactccgttttatatcaataccaaagaaggaagatatctggttctaaaagccgttaaagtatgcgatgttagaactgtagaatgcgaaggaagtaaagcttcctgcgtactcaaagtagataaaccctcatcacccgcgtgtgagagaagaccttcgtccccgtccagatgcgagagaatgaataaccctggaaaacaagtcccgtttatgaggacggacatgctacaaaatatgttcgcggctaatcgcgataatgtagcttctagacttttgaactaaaatacaattatatctttttcgatattaataaatccgtgtcgtccaggttttttatctctttcagtatgtgaatagataggtattttatctctattcatcatcgaatttaagagatccgataaacattgtttgtattctccagatgtcagcatctgatacaacaatatatgtgcacataaacctctggcacttatttcatgtaccttccccttatcactaaggagaatagtatttgagaaatatgtatacatgatattatcatgaattagatatacagaatttgtaacactctcgaaatcacacgatgtgtcggcgttaagatctaatatatcactcgataacacattttcatctagatacactagacattttttaaagctaaaatagtctttagtagtgacagtaactatgcgattattttcatcgatgatacatttcatcggcatattattacgcttaccatcaaagactataccatgtgtatatctaacgtattctagcatagttgccatacgtgcattaaacttttcaggatctttggatagatcttccaatctatctatttgagaaaacatttttatcatgttcaatagttgaaacgtcggatccactatatagatattatctataaagattttaggaactacgttcatggtatcctggcgaatattaaaactatcaatgatatgattatcgttttcatcttttatcaccatatagtttctaagatatgggattttacttaatataatattatttcccgtaataaattttattagaaatgccaaatctataagaaaagtcctcgaattagtttgaagaatatctatatcgccgtaccgtatatttggattaattagatatagagaatatgatccgtaacatatacaacttttattatggcgtctaagatattcttccatcaacttattaacatttttgactagggaagatacattatgacgtcccattacttttgccttgtctattattgcgacgttcatagaatttagcatatctcttgccaattcttccattgatgttacattataagaaattttagatgaaattacatttggagctttaatagtaagaactcctaatatgtccgtgtatgtggtcactaatacagattgtagttctataatcgtaaataatttacctatattatatgtttgagtctgtttagaaaagtagctaagtatacgatcttttatttctgatgcagatgtatcaacatcggaaaaaaatctttttttattcttttttactaaagatacaaatatgtctttgttaaaaacagttattttttgaatatttctagcttgtaattttaacatatgatattcattcacactaggtactctgcctaaataggtttctataatctttaatgtaatattaggaaaagtattctgatcaggattcctattcattttgaggatttaaaactctgattattgtctaatatggtctctacgcaaactttttcacagagcgatagagtttttgataactcgtttttcttaagaaatataaaactactgtctccagagctcgctctatcttttattttatttaattcgatacaaactcctgatactggttcagaaagtaattcattaattttcagtcctttatagaagatatttaatatagataatacaaaatcttcagtttttgatatcgatctgattgatcctagaactagatatattaataacgtgctcattaggcagtttatggcagcttgataattagatatagtatattccagttcatatttattagataccgcattgcccagattttgatattctatgaattcctctgaaaataaatccaaaataactaaacattctattttttgtggattagtgtactctcttccctctatcatgttcactactggtgtccacgatgataaatatctagagggaatataatatagtccataggatgccaatctagcaatgtcgaataactgtaatttgattcttcgttcttcattatgaattgattcttgaggtataaacctaacacaaattatattattagacttttcgtatgtaatgtctttcatgttataagtttttaatcctggaatagaatctattttaatgaggcttttaaacgcagagttctccaacgagtcaaagcataatactctgttgtttttcttatatacgatgttacgattttcttctttgaatggaataggtttttgaattagtttataattacaacataatagataaggaagtgtgcaaatagtacgcggaaaaaacataatagctcccctgttttcatccatggttttaagtaaatgatcactggcttctttagttaatggatattcgaacattaaccgtttcatcatcattggacagaatccatatttcttaatgtaaagagtgatcaaatcattgtgtttattgtaccatcttgttgtaaatgtgtattcggttatcggatctgctcctttttctattaaagtatcgatgtcgatctcgtctaagaattcaactatatcgacatatttcatttgtatacacataaccattactaacgtagaatgtataggaagagatgtaacgggaacagggtttgttgattcgcaaactattctaatacataattcttctgttaatacgtcttgcacgtaatctattatagatgccaagatatctatataattattttgtaagatgatgttaactatgtgatctatataagtagtgtaataattcatgtatttcgatatatgttccaactctgtctttgtgatgtctagtttcgtaatatctatagcatcctcaaaaaatatattcgcatatattcccaagtcttcagttctatcttctaaaaaatcttcaacgtatggaatataataatctattttacctcttctgatatcattaatgatatagtttttgacactatcttctgtcaattgattcttattcactatatctaagaaacggatagcgtccctaggacgaactactgccattaatatctctattatagcttctggacataattcatctattataccagaattaatgggaactattccgtatctatctaacatagttttaagaaagtcagaatctaagacctgatgttcatatattggttcatacatgaaatgatctctattgatgatagtgactatttcattctctgaaaattggtaactcattctatatatgctttccttgttgatgaaggatagaatatactcaatagaatttgtaccaacaaactgttctcttatgaatcgtatatcatcatctgaaataatcatgtaaggcatacatttaacaattagagacttgtctcctgttatcaatatactattcttgtgataatttatgtgtgaggcaaatttgtccacgttctttaattttgttatagtagatatcaaatccaatggagctacagttcttggcttaaacagatatagtttttctggaacaaattctacaacattattataaaggactttgggtagataagtgggatgaaatcctattttaattaatgctatcgcattgtcctcgtgcaaatatccaaacgcttttgtgatagtatggcattcattgtctagaaacgctctacgaatatctgtgacagatatcatctttagagaatatactagtcgcgttaatagtactacaatttgtattttttaatctatctcaataaaaaaattaatatgtatgattcaatgtataactaaactactaactgttattgataactagaatcagaatctaatgatgacgtaaccaagaagtttatctactgccaatttagctgcattatttttagcatctcgtttagattttccatctgccttatcgaatactcttccgtcgatgtctacacaggcataaaatgtaggagagttactaggcccaactgattcaatacgaaaagaccaatctctcttagttatttggcagtactcattaataatggtgacagggttagcatctttccaatcaataatttttttagccggaataacatcatcaaaagacttatgatcctctctcattgatttttcgcgggatacatcatctattatgacgtcagccatagcatcagcatccggcttatccgcctccgttgtcataaaccaacgaggaggaatatcgtcggagctgtacaccatagcactacgttgaagatcgtacagagctttattaacttctcgcttctccatattaagttgtctagttagttgtgcagcagtagctccttcgattccaatgtttttaatagccgcacacacaatctctgcgtcagaacgctcgtcaatatagatcttagacatttttagagagaactaacacaaccagcaataaaactgaacctactttatcatttttttattcatcatcctctggtggttcgtcgtttctatcgaatgtagctctgattaacccgtcatctataggtgatgctggttctggagattctggaggagatggattattatctggaagaatctctgttatttccttgttttcatgtatcgattgcgttgtaacattaagattgcgaaatgctctaaatttgggaggcttaaagtgttgtttgcaatctctacacgcgtgtctaactagtggaggttcgtcagctgctctagtttgaatcatcatcggcgtagtattcctacttttacagttaggacacggtgtattgtatttctcgtcgagaacgttaaaataatcgttgtaactcacatcctttattttatctatattgtattctactcctttcttaatgcattttataccgaataagagatagcgaaggaattctttttcggtgccgctagtacccttaatcatatcacatagtgttttatattccaaatttgtggcaatagacggtttatttctatacgatagtttgtttctggaatcctttgagtattctataccaatattattctttgattcgaatttagtttcttcgatattagattttgtattacctatattcttgatgtagtactttgatgatttttccatggcccattctattaagtcttccaagttggcatcatccacatattgtgatagtaattctcggatatcagtagcggctaccgccattgatgtttgttcattggatgagtaactactaatgtatacattttccatttataacacttatgtattaactttgttcatttatattttttcattattatgttgatattaacaaaagtgaatatatatgttaataattgtattgtggttatacggctacaatttcataatgagtggaagtcagtgtccgatgatcaatgacgatagctttactctgaaaagaaagtatcaaatcgatagtgcggagtcaacaatgaaaatggataagaagaggacaaagtttcagaatagagccaaaatggtaaaagaaataaatcagacaataagagcagcacaaactcattacgagacattgaaactaggatacataaaatttaagagaatgattaggactactactctagaagatatagcaccatctattccaaataatcagaaaacttataaactattctcggacatttcagccatcggcaaagcatcacagaatccgagtaagatggtatatgctctgctgctttacatgtttcccaatttgtttggagatgatcatagattcattcgttatagaatgcatccaatgagtaaaatcaaacacaagatcttctctcctttcaaacttaatcttattagaatattagtggaagaaagattctataataatgaatgcagatctaataaatggagaataattggaacacaagttgataaaatgttgatagctgaatctgataaatatacaatagatgcaaggtataacctaaaacccatgtatagaatcaagggaaaatctgaagaagataccctcttcatcaaacagatggtagaacaatgtgtgacatcccaggaattggtggaaaaagtgttgaagatactgtttagagatttgttcaagagtggagaatacaaagcgtacagatacgatgatgatgtagaaaatggatttattggattggatacactaaaattaaacattgttcatgatatagttgaaccatgtatgcctgttcgtaggccagtggctaagatactgtgtaaagaaatggtaaataaatactttgagaatccgctacatattattggtaaaaatcttcaagagtgcattgactttgttagtgaataggcatttcatctttctccaatactaattcaaattgttaaattaataatggatagtataaatagttattagtgataaaatagtaaaaataattattagaataagagtgtagtatcatagataactctcttctataaaaatggattttattcgtagaaagtatcttatatacacagtagaaaataatatagattttttaaaggatgatacattaagtaaagtaaacaattttaccctcaatcatgtactagctctcaagtatctagttagcaattttcctcaacacgttattactaaggatgtattagctaataccaatttttttgttttcatacatatggtacgatgttgtaaagtgtacgaagcggttttacgacacgcatttgatgcacccacgttgtacgttaaagcattgactaagaattatttatcgtttagtaacgcaatacaatcgtacaaggaaaccgtgcataaactaacacaagatgaaaaatttttagaggttgccgaatacatggacgaattaggagaacttataggcgtaaattatgacttagttcttaatccattatttcacggaggggaacccatcaaagatatggaaatcatttttttaaaactgtttaagaaaacagacttcaaagttgttaaaaaattaagtgttataagattacttatttgggcttacctaagcaagaaagatacaggcatagagtttgcggataatgatagacaagatatatacactctatttcaacaaactggtagaatcgtccatagcaatctaacagaaacgtttagagattatatctttcccggagataagactagctattgggtgtggttaaacgaaagtatagctaatgatgcggatattgttcttaatagacacgccattaccatgtatgataaaattcttagttatatatactctgagataaaacaaggacgcgttaataaaaacatgcttaagttagtttatatctttgagcctgaaaaagatatcagagaacttctgctagaaatcatatatgatattcctggagatatcctatctattattgatgcaaaaaacgacgattggaaaaaatattttattagtttttataaagctaattttattaacggtaatacatttattagtgatagaacgtttaacgaggacttattcagagttgttgttcaaatagatcccgaatatttcgataatgaacgaattatgtctttattctctacgagtgctgcggacattaaacgatttgatgagttagatattaataacagttatatatctaatataatttatgaggtgaacgatatcacattagatacaatggatgatatgaagaagtgtcaaatctttaacgaggatacgtcgtattatgttaaggaatacaatacatacctgtttttgcacgagtcggatcccatggtcatagagaacggaatactaaagaaactgtcatctataaaatccaagagtaaacggctgaacttgtttagcaaaaacattttaaaatattatttagacggacaattggctcgtctaggtcttgtgttagatgattataaaggagacttgttagttaaaatgataaaccatcttaagtctgtggaggatgtatccgcattcgttcgattttctacagataaaaaccctagtattcttccatcgctaatcaaaactattttagctagttataatatttccatcatcgtcttatttcaaaggtttttgagagataatctatatcatgtagaagaattcttggataaaagcatccatctaaccaagacggataagaaatatatacttcaattgataagacacggtagatcatagaacagaccaaatatattattaataatttggtatatacatagatattaattatcacatattaaaaattcacacatttttgataaatgggaactgctgcaacaattcagactcccaccaaattaatgaataaagaaaatgcagaaatgattttggaaaaaattgttgatcatatagttatgtatattagtgacgaatcaagtgattcagaaaataatcctgaatatattgattttcgtaacagatacgaagactatagatctctcattataaaaagtgatcacgagtttgtaaagctatgtaaaaatcatgcagagaaaagttctccagaaacgcaacaaatgattatcaaacacatatacgaacaatatcttattccagtatctgaagtactattaaaacctataatgtccatgggtgacataattacatataacggatgtaaagacaatgaatggatgctagaacaactctctaccctaaactttaacaatctccgcacatggaactcatgtagcataggcaatgtaacgcgtctgttttatacattttttagttatctgatgaaagataaactaaatatataagtataatcccattctaatactttaacctgatgtattagcatcttattagaatattaacctaactaaaagacataacataaaaactcattacatagttgataaaaagcggtaggatataaatattatggctgccaccgttccgcgttttgacgacgtgtacaaaaatgcacaaagaagaattctagatcaagaaacattttttagtagaggtctaagtagaccgttaatgaaaaacacatatctatttgataattacgcgtatggatggataccagaaactgcaatttggagtagtagatacgcaaacttagatgcaagtgactattatcccatttcgttgggattacttaaaaagttcgagtttctcatgtctctatataaaggtcctattccagtatacgaagaaaaagtaaatactgaattcatagccaatggatcgttctctggtagatacgtatcatatcttcgaaagttttctgctcttccaacaaacgagtttattagttttttattattgacctccatccctatctataatatcttattctggtttaaaaacacacagtttgatattactaaacacacattattcagatacgtctatacagataatgccaaacacctggcgttggctaggtatatgcatcaaacaggagactataagcctttgtttagtcgtctcaaagagaattatatatttaccggtcccgttccaatatgtatcaaagatatagatcaccctaatcttagtagagcaagaagtccatccgattatgagacattagctaatattagtactatattgtactttaccaagtatgatccggtattaatgtttttattgttttacgtacctgggtattcaattactacaaaaattactccagccgtagaatatctaatggataaactgaatctaacaaagagcgacgtacaactgttgtaaattattttatgcttcgtaaaatgtaggttttgaaccaaacattctttcaaagaatgagatgcataaaactttattatccaatagattgactatttcggacgtcaatcgtttaaagtaaacttcgtaaaatattctttgatcactgccgagtttaaaacttctatcgataattgtctcatatgttttaatatttacaagttttttggtccatggtacattagccggacaaatatatgcaaaataatatcgttctccaagttctatagtttctggattatttttattatattcagtaaccaaatacatattagggttatctgcggatttataatttgagtgatgcattcgactcaacataaataattctagaggagacgatctactatcaaattcggatcgtaaatctgtttctaaagaacggagaatatctatacatacctgattagaattcatccgtccttcagacaacatctcagacagtctggtcttgtatgtcttaatcatattcttatgaaacttggaaacatctcttctagtttcactagtacctttattaattctctcaggtacagattttgaattcgacgatgctgagtatttcatcgttgtatatttcttcttcgattgcataatcagattcttatataccgcctcaaactctattttaaaattattaaacaatactctattattaatcagtcgttctaactctttcgctatttctatagacttatcgacatcttgactgtctatctctgtaaacacggagtcggtatctccatacacgctacgaaaacgaaatctgtaatctataggcaacgatgttttcacaatcggattaatatctctatcgtccatataaaatggattacttaatggattggcaaaccgtaacataccgttagataactctgctccatttagtaccgattctagatacaagatcattctacgtcctatggatgtgcaactcttagccgaagcgtatgagtatagagcactatttctaaatcccatcagaccatatactgagttggctactatcttgtacgtatattgcatggaatcatagatggccttttcagttgaactggtagcctgttttaacatctttttatatctggctctctctgccaaaaatgttcttaatagtctaggaatggttccttctatcgatctatcgaaaattgctatttcagagatgaggttcggtagtctaggttcacaatgaaccgtaatatatctaggaggtggatatttctgaagcaatagctgattatttatttcttcttccaatctattggtactaacaacgacaccgactaatgtttccggagatagatttccaaagatacacacattaggatacagactgttataatcaaagattaatacattattactaaacattttttgttttggagcaaataccttaccgccttcataaggaaacttttgttttgtttctgatctaactaagatagttttagtttccaacaatagctttaacagtggacccttgatgactgtactcgctctatattcgaataccatggattgaggaagcacatatgttgacgcacccgcgtctgtttttgtttctactccataatactcccacaaatactgacacaaacaagcatcatgaatacagtatctagccatatctaaagctatgtttagattataatccttatacatctgagctaaatcaacgtcatcctttccgaaagataatttatatgtatcattaggtaaagtaggacataatagtacgactttaaatccattttcccaaatatctttacgaattactttacatataatatcctcatcaacagtcacataattacctgtggttaaaacctttgcaaatgcagcggctttgcctttcgcgtctgtagtatcgtcaccgataaacgtcatttctctaactcctctatttaatactttacccatgcaactgaacgcgttcttggatatagaatccaatttgtacgaatccaatttttcagatttttgaatgaatgaatatagatcgaaaaatatagttccattattgttattaacgtgaaacgtagtattggccatgccgcctactcccttatgactagactgatttctctcataaatacagagatgtacagcttcctttttgtccggagatctaaagataatcttctctcctgttaataactctagacgattagtaatatatctcagatcaaagttatgtccgttaaaggtaacgacgtagtcgaacgttagttccaacaattgtttagctattcgtaacaaaactatttcagaacatagaactagttctcgttcgtaatccatttccattagtgactgtatcctcaaacatcctctatcgacggcttcttgtatttcctgttccgttaacatctcttcattaatgagcgtaaacaataatcgtttaccacttaaatcgatataacagtaacttgtatgcgagattgggttaataaatacagaaggaaacttcttatcgaagtgacactctatatctagaaataagtacgatcttgggatatcgaatctaggtatttttttagcgaaacagttacgtggatcgtcacaatgataacatccattgttaatctttgtcaaatattgctcgtccaacgagtaacatccgtctggagatatcccgttagaaatataaaaccaactaatattgagaaattcatccatggtggcattttgtatgctgcgtttctttggctcttctatcaaccacatatctgcgacggagcattttctatctttaatatctagattataacttattgtctcgtcaatgtctatagttctcatctttcccaacggcctcgcattaaatggaggaggagacaatgactgatatatttcgtccgtcactacgtaataaaagtaatgaggaaatcgtataaatacggtctcaccatttcgacatctggatttcagatataaaaatctgttttcaccgtgactttcaaaccaattaatgcaccgaacatccatttatagaatttagaaatatattttcatttaaatgaatcccaaacattggggaagagccgtatggaccattatttttatagtactttcgcaagcgggtttagacggcaacatagaagcgtgtaaacgaaaactatatactatagttagcactcttccatgtcctgcatgtagacggcacgcgactattgctatagaggacaataatgtcatgtctagcgatgatctgaattatatttattattttttcatcagattatttaacaatttggcatctgatcccaaatacgcaatcgatgtgtcaaaggttaaacctttataaacttaacccattataaaacttatgattagtcacgactgaaataaccgcgtgattattttttggtataattctacacggcatggtttctgtgactatgaattcaacccccgttacattagtgaaatctttaacaaacagcaagggttcgtcaaagacataaaactcattgtttacaatcgaaatagaccccctatcacacttaaaataaaaaatatccttatcctttaccaccaaataaaattctgattggtcaatgtgaatgtattcacttaacagttccacaaatttatttattaactccgaggcacatacatcgtcggtattttttatggcaaactttactcttccagcatccgtttctaaaaaaatattaacgagttccatttatatcatccaatattattgaaatgacgttgatggacagatgatacaaataagaaggtacggtacctttgtccaccatctcctccaattcatgctctattttgtcattaactttaatgtatgaaaacagtacgccacatgcttccatgacagtgtgtaacactttggatacaaaatgtttgacattagtataattgtttaagactgtcaatctataatagatagtagctataatatattctatgatggtattgaagaagatgacaatcttggcatattgatcatttaacacagacatggtatcaacagatagcttgaatgaaagagaatcagtaattggaataagcgtcttctcgatggagtgtccgtataccaacatgtctgatattttgatgtattccattaaattatttagttttttctttttattctcgttaaacagcatttctgtcaacggaccccaacatcgttgaccgattaagttttgattgatttttccgtgtaaggcgtatctagtcagatcgtatagcctatccaataatccatcatctgtgcgtagatcacatcgtacactttttaattctctatagaagagcgacagacatctggaacaattacagacagcaatttctttattctctacagatgtaagatacttgaagacattcctatgatgatgcagaattttggataacacggtattgatggtatctgttaccataattcctttgatggctgatagtgtcagagcacaagatttccaatctttgacaatttttagcaccattatctttgttttgatatctatatcagacagcatggtgcgtctgacaacacagggattaagacggaaagatgaaatgattctctcaacatcttcaatggataccttgctattttttctggcattatctatatgtgcgagaatatcctctagagaatcagtatcctttttgatgatagtggatctcaatgacatgggacgtctaaaccttcttattctatcaccagattgcatggtgatttgtcttctttcttttatcataatgtaatctctaaattcatcggcaaattgtctatatctaaaatcataatatgagatgtttacctctacaaatatctgttcgtccaatgttagagtatctacatcagttttgtattccaaattaaacatggcaacggatttaattttatattcctctattaagtcctcgtcgataataacagaatgtagataatcatttaatccatcgtacatggttggaagatgcttgttgacaaaatctttaattgtcttgatgaaggtgggactatatctaacatcttgattaataaaatttataacattgtccataggatactttgtaactagttttatacacatctcttcatcggtaagtttagacagaatatcgtgaacaggtggtatattatattcatcagatatacgaagaacaatgtccaaatctatattgtttaatatattatatagatgtagtgtagctcctacaggaatatctttaactaagtcaatgatttcatcaaccgttagatctattttaaagttaatcatataggcattgatttttaaaaggtatgtagccttgactacattctcattaattaaccattccaagtcactgtgtgtaagaagattatattctatcataagcttgactacatttggtcccgataccattaaagaattcttatgatataaggaaacagcttttaggtactcatctactctacaagaattttggagagccttaacgatatcagtgacgtttattatttcaggaggaaaaaacctaacattgagaatgtcggagttaatagcttccagatacagtgattttggcaatagtccgtgtaatccataatccagtaacacgagctggtgcttgctagacaccttttcaatgtttaatttttttgaaataagctttgataaagccttcctcgcaaattccggatacatgaacatgtcggcgacatgattaagtattgttttttcattatttttatattttctcaacaagttctcaataccccaatagatgatagaatatcacccaatgcgtccatgttgtctatttccaacaggtcgctatatccaccaatagaagttttcccaaaaaagattctaggaacagttctaccaccagtaatttgttcaaaataatcccgcaattcattttcgggtttaaattctttaatatcgacaatttcatacgctcctcttttgaaactaaacttatttagaatatccagtgcatttctacaaaaaggacatgtatacttgacaaaaattgtcactttgttattggccaacctttgttgtacaaattcctcggccattttaatatttaagtgatataaaactatctcgacttatttaactctttagtcgagatatatggacgcagatagctatatgatagccaactacagaaggcaaacgctataaaaaacataattacgacgagcatatttataaatatttttattcagcattacttgatatagtaatattaggcacagtcaaacattcaaccactctcgatacattaactctctcattttctttaacaaattctgcaatatcttcgtaaaaagattcttgaaactttttagaatatctatcgactctagatgaaatagcgttcgtcaacatactatgttttgtatacataaaggcgcccattttaacagtttctagtgacaaaatgctagcgatcctaggatcctttagaatcacatagattgacgattcgtctctcttagtaactctagtaaaataatcatacaatctagtacgcgaaataatattatccttgacttgaggagatctaaacaatctagttttgagaacatcgataagttcatcgggaatgacatacatactatctttaatagaactcttttcatccagttgaatggattcgtccttaaccaactgattaatgagatcttctattttatcattttccagatgatatgtatgtccattaaagttaaattgtgtagcgcttctttttagtctagcagccaatactttaacatcactaatatcgatatacaaaggagatgatttatctatggtattaagaattcgtttttcgacatccgtcaaaaccaattcctttttgcctgtatcatccagttttccatcctttgtaaagaaattattttctactagactattaataagactgataaggattcctccataattgcacaatccaaactttttcacaaaactagactttacgagatctacaggaatgcgtacttcaggtttcttagcttgtgattttttcttttgcggacattttcttgtgaccaactcatctaccatttcattgattttagcagtgaaataagctttcaatgcacgggcactgatactattgaaaacgagttgatcttcaaattccgccatttaagttcaccaaacaacttttaaatacaaatatatcaatagtagtagaataagaactataaaaaaaataataattaaccaataccaaccccaacaaccggtattattagttgatgtgactgttttctcatcacttagaacagatttaacaatttctataaagtctgtcaaatcatcttccggagaccccataaatacaccaaatatagcggcgtacaacttatccatttatacattgaatattggcttttctttatcgctatcttcatcatattcatcatcaatatcaacaagtcccagattacgagccagatcttcttctacattttcagtcattgatacacgttcactatctccagagagtccgataacgttagccaccacttctctatcaatgattagtttcttgagtgcgaatgtaatttttgtttccgttccggatctatagaagacgataggtgtgataattgccttggccaattgtctttctcttttactgagtgattctagttcaccttctatagatctgagaatggatgattctccagccgaaacatattctaccatggctccgtttaatttgttgatgaagatggattcatccttaaatgttttctctgtaatagtttccaccgaaagactatgcaaagaatttggaatgcgttccttgtgcttaatgtttccatagacggcttctagaagttgatacaacataggactagccgcggtaacttttatttttagaaagtatccatcgcttctatcttgtttagatttatttttataaagtttagtctctccttccaacataataaaagtggaagtcatttgactagataaactatcagtaagttttatagagatagacgaacaattagcgtattgagaagcatttagtgtaacgtattcgatacattttgcattagatttactaatcgattttgcatactctataacacccgcacaagtctgtagagaatcgctagatgcagtaggtcttggtgaagtttcaactctcttcttgattaccttactcatgattaaacctaaataattgtactttgtaatataatgatatatattttcactttatctcatttgagaataaaaatgtttttgtttaaccactgcatgatgtacagatttcggaatcgcaaaccaccagtggttttattttatccttgtccaatgtgaattgaatgggagcggatgcgggtttcgtacgtagatagtacattcccgtttttagaccgagactccatccgtaaaaatgcatactcgttagtttggaataactcggatctgctatatggatattcatagattgactttgatcgatgaaggctcccctgtctgcagccatttttatgatcgtcttttgtggaatttcccaaatagttttataaactcgcttaatatcttctggaaggtttgtattctgaatggatccaccatctgccataatcctattcttgatctcatcattccataattttctctcggttaaaactctaaggagatgcggattaactacttgaaattctccagacaatactctccgagtgtaaatattactggtatacggttccaccgactcattatttcccaaaatttgagcagttgatgcagtcggcataggtgccaccaataaactatttctaagaccgtatgttctgattttatcttttagaggttcccaattccaaagatccgacggtacaacattccaaagatcatattgtagaataccgttactggcgtacgatcctacatatgtatcgtatggtccttccttctcagctagttcacaactcgcctctaatgcaccgtaataaatggtttcgaagatcttcttatttagatcttgtgcttccaggctatcaaatggataatttaagagaataaacgcgtccgctaatccttgaacaccaataccgataggtctatgtctcttattagagatttcagcttctggaataggataataattaatatctataattttattgagatttctgacaattactttgaccacatccttcagtttgagaaaatcaaatcgcccatctattacaaacatgttcaaggcaacagatgccagattacaaacggctacctcattagcatccgcatattgtattatctcagtgcaaagattactacacttgatagttcctaaattttgttgattactctttttgttacacgcatccttataaagaatgaatggagtaccagtttcaatctgagattctataatcgctttccagacgactcgagcctttattatagatttgtatctcctttctctttcgtatagtgtatacaatcgttcgaactcgtctccccaaacattgtccaatccaggacattcatccggacacatcaacgaccactctccgtcatccttcactcgtttcataaagagatcaggaatccaaagagctataaatagatctctggttctatgttcctcgtttcctgtattctttttaagatcgaggaacgccataatatcagaatgccacggttccaagtatatggccataactccaggccgtttgtttcctccctgatctatgtatctagcggtgttattataaactctcaacattggaataataccgtttgatataccattggtaccggagatatagcttccactggcacgaatattactaattgatagacctattccccctgccattttagagattaatgcgcatcgttttaacgtgtcatagataccctctatgctatcatcgatcatgttaagtaaaaaacagctagacatttggtgacgactagttcccgcattaaataaggtaggagaagcgtgcgtaaaccatttttcagaaagtagattgtacgtctcaatagctgagtctatatcccattgatgaattcctactgcgacacgcattaacatgtgctgaggtctttcaacgatcttgttgtttattttcaacaagtaggatttttccaaagttttaaaaccaaaatagttgtatgaaaagtctcgttcgtaaataataaccgagttgagtttatccttatatttgttaactatatccatggtgatacttgaaataatcggagaatgtttcccatttttaggattaacatagttgaataaatcctccatcacttcactaaatagtttttttgtttccttgtgtagatttgatacggctattctggcggctagaatggcataatccggatgttgtgtagtacaagtggctgctatttcggctgccagagtgtccaattctaccgttgttactccattatatattccttgaataaccttcatagctattttaataggatctatatgatccgtgtttaagccataacataattttctaatacgagacgtgattttatcaaacatgacattttccttgtatccatttcgtttaatgacaaacatttttgttggtgtaataaaaaaattatttaacttttcattaatagggatttgacgtatgtagcgtacaaaattatcgttcctggtatatagataaagagtcctatatatttgaaaatcgttacggctcgattaaactttaatgattgcatagtgaatatatcattaggatttaactccttgactatcatggcggcgccagaaattaccatcaaaagcattaatacagttatgccgatcgcagttagaacggttatagcatccaccatttatatctaaaaattagatcaaagaatatgtgacaaagtcctagttgtatactgagaattgacgaaacaatgtttcttacatatttttttcttattagtaactgacttaatagtaggaactggaaagctagacttgattattctataagtatagatacccttccagataatgttctctttgataaaagttccagaaaatgtagaattttttaaaaagttatcttttgctattaccaagattgtgtttagacgcttattattaatatgagtaatgaaatccacaccgcctctagatatcgcctttatttccacattagatggtaaatccaatagtgaaactatctttttaggaatgtatggactcgcgtttagaggagtgaacgtcttgggcgtcggaaaggatgattcgtcaaacgaataaacaatttcacaaatggatgttaatgtattagtaggaaatttcttgacgctagtggagttgaagattctaatggatgatgttctacctatttcatccgataacatgttaatttccgacaccaacggttttaatatttcgatgatatacggtagtctctctttcggacttatatagcttattccacaatacgagtcattatatactccaaaaaacaaaataactagtataaaatctgtatcgaatgggaaaaacgaaattatcgacataggtatagaatccggaacattgaacgtattaatacttaattctttttctgtggtaagtaccgataggttattgacattgtatggttttaaatattctataacttgagacttgatagatattagtgatgaattgaaaattatttttatcaccacgtgtgtttcaggatcatcgtcgacgcccgtcaaccaaccgaatggagtaaaataaatatcattaatatatgctctagatattagtatttttatcaatcctttgattatcatcttctcgtaggcgaatgattccatgatcaagagtgatttaagaacatcctccggagtattaatgggcttagtaaacagtccatcgttgcaataataaaagttatccaagttaaaggatattatgcattcgtttaaagatatcacctcatctgacggagacaattttttggtaggttttagagactttgaagctacttgtttaacaaagttattcatcgtcgtctactattctatttaattttgtagttaatttatcacatatcacattaattgactttttggtccatttttccatacgtttatattcttttaatcctgcgttatccgtttccgttatatccagtgatagatcgtgcaggttaaatagaatgctcttaaataatgtcatttttttatccgctaaaaatttaaagaatgtataaacctttttcagagatttgaaactcttaggtggtgtcctagtacacaatatcataaacaaactaataaacattccacattcagattccaacagctgattaacttccacattaatacagcctattttcgctccaaatgtacattcgaaaaatctgaataaaacatcgatgtcacaatttgtattatccaatacagaatgtctgtgattcgtgttaaaaccatcggagaaggaatagaaataaaaattattatagtggtggaattcagttggaatattgcctccggagtcataaaaggatactaaacattgttttttatcataaattacacatttccaatgagacaaataacaaaatccaaacattacaaatctagaggtagaacttttaattttgtctttaagtatatacgataagatatgtttattcataaacgcgtcaaatttttcatgaatcgctaaggagtttaagaatctcatgtcaaattgtcctatataatccacttcggatccataagcaaactgagagactaagttcttaatacttcgattgctcatccaggctcctctctcaggctctattttcatcttgacgacctttggattttcaccagtatgtattcctttacgtgataaatcatcgattttcaaatccatttgtgagaagtctatcgccttagatactttttcccgtagtcgaggtttaaaaaaatacgctaacggtatactagtaggtaactcaaagacatcatatatagaatggtaacgcgtctttaactcgtcggttaactctttcttttgatcgagttcgtcgctactattgggtctgctcaggtgccccgactctactagttccaacatcataccgataggaatacaagacactttgccggcggttgtagatttatcatatttctccactacatatccgttacaatttgttaaaaatttagatacatctatattgctacataatccagctagtgaatatatatgacataataaattggtaaatcctagttctggtattttactaattactaaatctgtatatctttccatttatcatggaaaagaatttaccagatatcttcttttttccaaactgcgttaatgtattctcttacaaatattcacaagatgaattcagtaatatgagtaaaacggaacgtgatagtttctcattggccgtgtttccagttataaaacatagatggcataacgcacacgttgtaaaacataaaggaatatacaaagttagtacagaagcacgtggaaaaaaagtatctcctccatcactaggaaaacccgcacacataaacctaaccacgaaacaatatatatacagtgaacacacaataagctttgaatgttatagttttctaaaatgtataacaaatacagaaatcaattcgttcgatgagtatatattaagaggactattagaagctggtaatagtttacagatattttccaattccgtaggtaaacgaacagatactataggtgtactagggaataagtatccatttagcaaaattccattggcctcattaactcctaaagcacaacgagagatattttcagcgtggatttctcatagacctgtagttttaactggaggaactggagtgggtaagacgtcacaggtacccaagttattgctttggtttaattatttatttggtggattctctactctagataaaatcactgactttcacgaaagaccagtcattctatctcttcctaggatagctttagttagattgcatagcaataccattttaaaatcattgggatttaaggtactagatggatctcctatttctttacggtacggatctataccggaagaattaataaacaaacaaccaaaaaaatatggaattgtattttctacccataagttatctctaacaaaactatttagttatggcactcttattatagacgaagttcatgagcatgatcaaataggagatattattatagcagtagcgagaaagcatcatacgaaaatagattctatgtttttaatgactgccacgttagaggatgacagggaacggctaaaagtatttttacctaatcccgcatttatacatattcctggagatacactgtttaaaattagcgaggtatttattcataataagataaatccatcttccagaatggcatacatagaagaagaaaagagaaatttagttactgctatacagatgtatactcctcctgatggatcatccggtatagtctttgtggcatccgttgcacagtgtcacgaatataaatcatatttagaaaaaagattaccgtatgatatgtatattattcatggtaaggtcttagatatagacgaaatattagaaaaagtgtattcatcacctaatgtatcgataattatttctactccttatttggaatccagcgttactatacgcaatgttacacacatttatgatatgggtagagtttttgtccccgctccttttggaggatcgcaagaatttatttctaaatctatgagagatcaacgaaaaggaagagtaggaagagttaatcctgggacatacgtatatttctatgatctgtcttatatgaagtctatacagcgaatagattcagaatttctacataattatatattgtacgctaataagtttaatctaacactccccgaagatttgtttataatccctacaaatttggatattctatggcgtacaaaggaatatatagactcgttcgatattagtacagaaacatggaataaattattatccaattattatatgaagatgatagagtatgctaaactttatgtactaagtcctattctcgctgaggagttggataactttgagaggacgggagaattaactagtattgtacgagaagccattttatctctaaatttacgaattaagattttaaattttaaacataaagatgatgatacgtatatacacttttgtaaaatattattcggtgtctataacggaacaaacgctactatatattatcatagacctctaacgggatatatgaatatgatttcagatactatatttgttcctgtagataataactaaaaatcaaactctaatgaccacatctttttttagagatgaaaaattttccacatctccttttgtagacacgactaaacattttgcagaaaaaagtttattagtgtttagataatcgtatacttcatcagtgtagatagtaaatgtgaacagataaaaggtattcttgctcaatagattggtaaattccatagaatatattaatcctttcttcttgagatcccacatcatttcaaccagagacgttttatccaatgatttacctcgtactataccacatacaaaactagattttgcagtgacgtcgtacctggtattcctaccaaacaaaattttacttttagttcttttagaaaattctaaggtagaatctctatttgccaatatgtcatctatggaattaccactagcaaaaaatgatagaaatatatattgatacatcgcagctggttttgatctactatactttaaaaacgaatcagattccataattgcctgtatatcatcagctgaaaaactatgttttacacgtattccttcggcatttctttttaatgatatatcttgtttagacaatgataaagttatcatgtccatgagagacgcgtctccgtatcgtataaatatttcattagatgttagacgcttcattaggggtatacttctataaggtttcttaatcagtccatcattggttgcgtcaagaactactatcggatgttgttgggtatctctagtgttacacatggccttactaaagtttgggtaaataactatgatatctctattaattatagatgcatatatttcattcgtcaaggatattagtatcgacttgctatcgtcattaatacgtgtaatgtaatcatataaatcatgcgatagccaaggaaaattcaaatagatgttcatcatataatcgtcgctataattcatattaatactttgacattgactaatttgtaatatagcctcgccacgaagaaagctctcgtattcagtttcatcgataaaggataccgttaaatataactggttgccgatagtctcatagtctattaagtggtaagtttcgtacaaatacagaatccctaaaatattatctaatgttggattaatctttaccataactgtataaaatggagacggagtcataactattttaccgtttgtacttactggaatagatgaaggaataatctccggacatgctggtaaagacccaaatgtctgtttgaagaaatccaatgttccaggtcctaatctcttaacaaaaattacgatattcgatcccgatatcctttgcattctatttaccagcatatcacgaactatattaagattatctatcatgtctattctcccaccgttatataaatcgcctccgctaagaaacgttagtatatccatacaatggaatacttcatttctaaaatagtattcgttttctaattctttaatgtgaaatcgtatactagaaagggaaaaattatctttgagttttccgttagaaaagaaccacgaaactaatgttctgattgcgtccgattccgttgctgaattaatggatttacaccaaaaactcatataacttctagatgtagaagcattcgctaaaaaattagtagaatcaaaggatataagtagatgttccaacaagtgagcaattcccaagatttcatctatatcattctcgaatccgaaattagaaattcccaagtagatatcctttttcatccgatcattgatgaaaatacgaactttattcggtaagacaatcatttactaaggagtaaaataggaagtaatgttcgtatgtcgttatcatcgtataaattaaaggtgtgttttttaccattaagtgacattataattttaccaatattggaattataatataggtgtatttgcgcactcgcgacggttgatgcatcggtaaatatagctgtatctaatgttctagtcggtatttcatcatttcgctgtctaataatagcgttttctctatctgtttccattacagctgcctgaagtttattggtcggataatatgtaaaataataagaaatacatacgaataacaaaaataaaataagatataataaagatgccatttagagatctaattttgttcaacttgtccaaattcctacttacagaagatgaggaatcgttggagatagtgtcttccttatgtagaggatttgaaatatcttatgatgacttgataacttactttccagataggaaataccataaatatatttctaaagtatttgaacatgtagatttatcggaggaattaagtatggaattccatgatacaactttgcgagatttagtttatcttagattgtacaagtattccaagtgtatacggccgtgttataaattaggagataatctaaaaggcatagttgttataaaggacaggaatatttatattagggaagcaaatgatgacttgatagaatatctcctcaaggaatacactcctcagatttatacatattctaatgagcgcgtccccataactggttcaaaattaattctttgtggattttctcaagttacatttatggcgtatacaacgtcgcatataacaacaaataaaaaggtagatgttctcgtttccaaaaaatgtatagatgaactagtcgatccaataaattatcaaatacttcaaaatttatttgataaaggaagcggaacaataaacaaaatactcaggaagatattttattcggtaacaggtggccaaactccataggtagctttttctatttcggattttagaatttccaaattcaccagcgatttatcggttttggtgaaatccaaggatttattaatgtccacaaatgccatttgttttgtctgtggattgtatttgaaaatggaaacgatgtagttagatagatgcgctgcgaagtttcctattagggttccgcgcttcacgtcacccagcatacttgaatcaccatcctttaaaaaaaatgataagatatcaacatggagtatatcatactcggattttaattcttctactgcatcactgacattttcacaaatactacaatacggtttaccgaaaataatcagtacgttcttcatttatgggtatcaaaaacttaaaatcgttactgctggaaaataaatcactgacgatattagatgataatttatacaaagtatacaatggaatatttgtggatacaatgagtatttatatagccgtcgccaattgtgtcagaaacttagaagagttaactacggtattcataaaatacgtaaacggatgggtaaaaaagggagggcatgtaaccctttttatcgatagaggaagtataaaaattaaacaagacgttagagacaagagacgtaaatattctaaattaaccaaggacagaaaaatgctagaattagaaaagtgtacatccgaaatacaaaatgttaccggatttatggaagaagaaataaaggcagaaatgcaattaaaaatcgataaactcacatttcaaatatatttatctgattctgataacataaaaatatcattgaatgagatactaacacatttcaacaataatgagaatgttacattattttattgtgatgaacgagacgcagaattcgttatgtgtctcgaggctaaaacacatttctctaccacaggagaatggccgttgataataagtaccgatcaggatactatgctatttgcatctactgataatcatcctaagatgataaaaaacttaactcaactgtttaaatttgttccctcggcagaggataactatttagcaaaattaacggcgttagtgaatggatgtgatttctttcctggactctatggggcatctataacacccaacaacttaaacaaaatacaattgtttagtgattttacaatcgataatatagtcactagtttggcaattaaaaattattatagaaagactaactctaccgtagacgtgcgtaatattgttacgtttataaacgattacgctaatttagacgatgtctactcgtatgttcctccttgtcaatgcactgttcaagaatttatattttccgcattagatgaaaaatggaacaattttaaatcatcttatttagagaccgttccgttaccctgtcaattaatgtacgcgttagaaccacgcaaggagattgatgtttcagaagttaaaactttatcatcttatatagatttcgaaaatactaaatcagatatcgatgttataaaatctatatcctcgatcttcggatattctaacgaaaactgtaacacgatagtattcggcatctataaggataatttactactgagtataaataattcattttactttaacgatagtctgttaataaccaatactaaaagtgataatataataaatataggttactagattaaaaatggtgttccaactcgtgtgctctacatgcggtaaagatatttctcacgaacgatataaattgattatacgaaaaaaatcattaaaggatgtactcgtcagtgtaaagaacgaatgttgtaggttaaaattatctacacaaatagaacctcaacgtaacttaacagtgcaacctctattggatataaactaatatggatccggttaattttatcaagacatatgcgcctagaggttctattatttttattaattataccatgtcattaacaagtcatttgaatccatcgatagaaaaacatgtgggtatttattatggtacgttattatcggaacacttggtagttgaatctacctatagaaaaggagttcgaatagtcccattggatagtttttttgaaggatatcttagtgcaaaagtatacatgttagagaatattcaagttatgaaaatagcagctgatacgtcattaactttattgggtattccgtatggatttggtcataatagaatgtattgttttaaattggtagctgactgttataaaaatgccggtgttgaaacatcgtctaaacgaatattaggtaaagatatttttctgagccaaaacttcacagacgataatagatggataaagatatatgattctaataatttaacattttggcaaattgattaccttaaagggtgagttaatatgcataactactcctccgttgttttttcccacgttctttttcttaacgttgtttgccatcactctcataatgtaaagatattctaaaatggtaaacttttgcatatcggacgcagaaattggtataaatgttgtaattgtattatttcccgtcaatggactagtcacagctccatcagttttatatcctttagagtatttctcactcgtgtctagcattctagagcattccatgatctgtttatcgttgatattggccggaaagatagattttttattttttattatattactattggcaattgtagatataacttctggtaaatatttttctaccttttcaatttcttctattttcaagccggctatatattctgctatattgttgctagtatcaataccttttctggctaagaagtcatatgtggtattcactatatcagttttaactggtagttccattagcctttccacttctgcagaataatcagaaattggttctttaccagaaaatccagctactataataggctcaccgatgatcattggcaaaatcctatattgtaccagattaatgagagcatatttcatttccaataattctgctagttcttgagacattgatttatttgatgaatctagttggttctctagatactctaccatttctgccgcatacaataacttgttagataaaatcagggttatcaaagtgtttagcgtggctagaatagtgggcttgcatgtattaaagaatgcggtagtatgagtaaaccgttttaacgaattatatagtctccagaaatctgtggcgttacatacatgagccgaatgacatcgaagattgtccaatatttttaatagctgctctttgtccattatttctatatttgactcgcaacaattgtagataccattaatcactgattcctttttcgatgccggacaatagcacaattgtttagctttggactctatgtattcagaattaatagatatatctcttaatacagattgcactatacattttgaaactatgtcaaaaattgtagaacgacgctgttctgcagccatttaactttaaataatttacaaaaatttaaaatgagcatccgtataaaaatcgataaactgcgccaaattgtggcatatttttcagagttcagtgaagaagtgtctataaatgtagactcgacggatgagttaatgtatatttttgccgccttgggcggatctgtaaacatttgggccattatacctctcagtgcatcagtgttctaccgaggagccgaaaacattgtgtttaatcttcctgtgtccaaggtaaaatcgtgtttgtgtagttttcacaatgatgccatcatagatatagaacctgatctggaaaataatctagtaaaactttctagttatcatgtagtaagtgtcgattgtaataaggaactgatgcctattaggacagatactactatttgtctaagtatagatcaaaagaaatcttatgtgtttaattttcacaagtatgaagaaaaatgttgtggtagaaccgtcattcatttagaatggttgttgggctttatcaagtgtattagtcagcatcagcatctggctattatgtttaaagatgacaatattattatgaagactcctggtaatactgatgcattttccagggaatattctatgactgaatgttctcaagaactacaaaagttttctttcaaaatagctatctcgtctctcaacaaactacgaggattcaaaaagagagtcaatgtttttgaaactagaatcgtaatggataatgacgataacattctaggaatgttgttttcggatagagttcaatcctttaagatcaacatctttatggcgtttttagattaatactttcaatgagataaatatgggtggcggagtaagtgttgagctccctaaacgggatccgcctccgggagtacccactgatgagatgttattaaacgtggataaaatgcatgacgtgatagctcccgctaagcttttagaatatgtgcatataggaccactagcaaaagataaagaggataaagtaaagaaaagatatccagagtttagattagtcaacacaggacccggtggtctttcggcattgttaagacaatcgtataatggaaccgcacccaattgctgtcgcacttttaatcgtactcattattggaaaaaggatggaaagatatcagataagtatgaagagggtgcagtattagaatcgtgttggccagacgttcacgacactggaaaatgcgatgttgatttattcgactggtgtcagggggatacgttcgatagaaacatatgccatcagtggatcggttcagcctttaataggagtaatagaactgtagagggtcaacaatcgttaataaatctgtataataagatgcaaacattatgtagtaaagatgctagtgtaccaatatgtgaatcatttttgcatcatttacgcgcacacaatacagaagatagcaaagagatgatcgattatattctaagacaacagtctgcggactttaaacagaaatatatgagatgtagttatcccactagagataagttagaagagtcattaaaatatgcggaacctcgagaatgttgggatccagagtgttcgaatgccaatgttaatttcttgctaacacgtaattataataatttaggactttgcaatattgtacgatgtaatactagcgtgaacaacttacagatggataaaacttcctcattaagattgtcatgtggattaagcaatagtgatagattttctactgttcccgtcaatagagcaaaagtagttcaacataatattaaacactcgttcgacctaaaattgcatttgatcagtttattatctctcttggtaatatggatactaattgtagctatttaaatgggtgccgcagcaagcatacagacgacggtgaatacactcagcgaacgtatctcgtctaaattagaacaagaagcgaatgctagtgctcaaacaaaatgtgatatagaaatcggaaatttttatatccgacaaaaccatggatgtaacctcactgttaaaaatatgtgctctgcggacgcggatgctcagttggatgctgtgttatcagccgctacagaaacatatagtggattaacaccggaacaaaaagcatacgtgccagctatgtttactgctgcgttaaacattcagacgagtgtaaacactgttgttagagattttgaaaattatgtaaaacaaacttgtaattctagcgcggtcgtcgataacaaattaaagatacaaaacgtaatcatagatgaatgttacggagccccaggatctccaacaaatttggaatttattaatacaggatctagcaaaggaaattgtgccattaaggcgttgatgcaattgactactaaggccactactcaaatagcacctagacaagttgctggtacaggagttcagttttatatgattgttatcggtgttataatattggcagcgttgtttatgtactatgccaagcgtatgctgttcacatccaccaatgataaaatcaaacttattttagccaataaggaaaacgtccattggactacttacatggacacattctttagaacttctccgatggttattgctaccacggatatgcaaaactgaaaatatattgataatattttaatagattaacatggaagttatcgctgatcgtctagacgatatagtgaaacaaaatatagcggatgaaaaatttgtagattttgttatacacggtctagagcatcaatgtcctgctatacttcgaccattaattaggttgtttattgatatactattatttgttatagtaatttatatttttacggtacgtctagtaagtagaaattatcaaatgttgttggcgttggtggcgctagtcatcacattaactattttttattactttatactataatagtactagactgacttctaacaaacatctcacctgccataaataaatgcttgatattaaagtcttctatttctaacactattccatctgtggaaaataatactctgacattatcgctaattgacacatcggtgagtgatatgcctataaagtaataatcttctttgggcacatataccagtgtaccaggttctaacaacctatttactggtgctcctgtagcatactttttctttaccttgagaatatccatcgtttgcttggtcaatagcgatatgtgattttttatcaaccactcgaaaaagtaattggagtgttcatatcctctacgggctattgtctcatggccgtgtatgaaatttaagtaacacgactgtggtagatttgttctatagagccggttgccgcaaatagatagaactaccaatatgtctgtacaaatgttaaacattaattgattaacagaaaaaacaatgttcgttctgggaatagaaaccagatcaaaacaaaattcgttagaatatatgccacgtttatacattgaatataaaataactacagtttgaaaaataacagtatcatttaaacatttaacttgcggggttaatttcacaactttactgtttttaagctgttcaaaatatagcatcgatccatgagaaatacgtttagccgcctttaatagaggaaatcccaccgcctttctggatctcaccaacgacgatagttctgaccagcaactcatttcttcatcatccacctgttttaacatataataggcaggagatagatatccgtcattgcaatattccttttcgtaggcacacaatctaatattgataaaatctccattctcttctctgcatttattatcttgtttcggtggctgattaggctgtagtcttggtttaggccttggtctatcgttgttgaatctattttggtcattaaatctttcatttcttcctggtatatttctatcacctcgtttggttggatttttgtctatattatcgtttgtaacatcggtacgggtattcatttatcacaaaaaaaacttctctaaatgagtctactgctagaaaacctcatcgaagaagataccatattttttgcaggaagtatatctgagtatgatgatttacaaatggttattgccggcgcaaaatccaaatttccaagatctatgctttctatttttaatatagtacctagaacgatgtcaaaatatgagttggagttgattcataacgaaaatatcacaggagcaatgtttaccacaatgtataatataagaaacaatttgggtctaggagatgataaactaactattgaagccattgaaaactatttcttggatcctaacaatgaagttatgcctcttattattaataatacggatatgactgccgtcattcctaaaaaaagtggtaggagaaagaataagaacatggttatcttccgtcaaggatcatcacctatcttgtgcattttcgaaactcgtaaaaagattaatatttataaagaaaatatggaatccgcatcgactgagtatacacctatcggagacaacaaggctttgatatctaaatatgcgggaattaatgtcctgaatgtgtattctccttccacatccatgagattgaatgccatttacggattcaccaataaaaataaactagagaaacttagtactaataaggaactagaatcgtatagttctagccctcttcaagaacccattaggttaaatgattttctgggactattggaatgtgttaaaaagaatattcctctaacagatattccgacaaaggattgattactataaatggagaatgttcctaatgtatactttaatcctgtgtttatagagcccacgtttaaacattctttattaagtgtttataaacacagattaatagttttatttgaagtattcgttgtattcattctaatatatgtattttttagatctgaattaaatatgttcttcatgcctaaacgaaaaatacccgatcctattgatagattacgacgtgctaatctagcgtgtgaagacgataaattaatgatctatggattaccatggatgacaactcaaacatctgcgttatcaataaatagtaaaccgatagtgtataaagattgtgcaaagcttttgcgatcaataaatggatcacaaccagtatctcttaacgatgttcttcgcagatgatgattcattttttaagtatttggctagtcaagatgatgaatcttcattatctgatatattgcaaatcactcaatatctagactttctgttattattattgatccaatcaaaaaataaattagaagccgtgggtcattgttatgaatctctttcagaggaatacagacaattgacaaaattcacagactctcaagattttaaaaaactgtttaacaaggtccctattgttacagatggaagggtcaaacttaataaaggatatttgttcgactttgtgattagtttgatgcgattcaaaaaagaatcctctctagctaccaccgcaatagatcctattagatacatagatcctcgtcgcgatatcgcattttctaacgtgatggatatattaaagtcgaataaagtgaacaataattaattctttattgtcatcatgaacggcggacatattcagttgataatcggccccatgttttcaggtaaaagtacagaattaattagacgagttagacgttatcaaatagctcaatataaatgcgtgactataaaatattctaacgataatagatacggaacgggactatggacgcatgataagaataattttgaagcattggaagcaactaaactatgtgatgtcttggaatcaattacagatttctccgtgataggtatcgatgaaggacagttctttccagacattgttgaattctgtgagcgtatggcaaacgaaggaaaaatagttatagtagccgcactcgatgggacatttcaacgtaaaccgtttaataatattttgaatcttattccattatctgaaatggtggtaaaactaactgctgtgtgtatgaaatgctttaaggaggcttccttttctaaacgattgggtgaggaaaccgagatagaaataataggaggtaatgatatgtatcaatcggtgtgtagaaagtgttacatcgactcataatattatattttttatctaaaaaactaaaaataaacattgattaaattttaatataatacttaaaaatggatgttgtgtcgttagataaaccgtttatgtattttgaggaaattgataatgagttagattacgaaccagaaagtgcaaatgaggtcgcaaaaaaactgccgtatcaaggacagttaaaactattactaggagaattattttttcttagtaagttacagcgacacggtatattagatggtgccaccgtagtgtatataggatcggctcctggtacacatatacgttatttgagagatcatttctataatttaggaatgattatcaaatggatgctaattgacggacgccatcatgatcctattctaaatggattgcgtgatgtgactctagtgactcggttcgttgatgaggaatatctacgatccatcaaaaaacaactgcatccttctaagattattttaatttctgatgtaagatccaaacgaggaggaaatgaacctagtacggcggatttactaagtaattacgctctacaaaatgtcatgattagtattttaaaccccgtggcatctagtcttaaatggagatgcccgtttccagatcaatggatcaaggacttttatatcccacacggtaataaaatgttacaaccttttgctccttcatattcagctgaaatgagattattaagtatttataccggtgagaacatgagactgactcgagttaccaaatcagacgttgtaaattatgaaaaaaagatgtactaccttaataagatcgtccgtaacaaagtagttgttaactttgattatcctaatcaggaatatgactattttcacatgtactttatgctgaggaccgtgtactgcaataaaacatttcctactactaaagcaaaggtactatttctacaacaatctatatttcgtttcttaaatattccaacaacatcaactgaaaaagttagtcatgaaccaatacaacgtaaaatatctagcaaaaattctatgtctaaaaacagaaatagcaagagatccgtacgcggtaataaatagaaacgtactactgagatatactaccgatatagagtataatgatttagttactttaataaccgttagacataaaattgattctatgaaaactgtgtttcaggtatttaacgaatcatccataaattatactccggttgatgatgattatggagaaccaatcattataacatcgtatcttcaaaaaggtcataacaagtttcctgtaaattttctatacatagatgtggtaatatctgacttatttcctagctttgttagactagatactacagaaactaatatagttaatagtgtactacaaacaggcgatggtaaaaagactcttcgtcttcccaaaatgttagagacggaaatagttgtcaagattctctatcgccctaatataccattaaaaattgttagatttttccgcaataacatggtaactggagtagagatagccgatagatctgttatttcagtcgctgattaatcaattagtagagatgagataagaacattataataatcaataatatatcttatatcttatatcttatatcttgtttagaaaaatgctaatattaaaatagctaacgctagtaatccaatcggaagccatttgatatctataatagggtatctaatttcctgatttaaatagcggacagctatattctcggtagctactcgtttggaatcacaaacattatttacatctaatttactatctgtaatggaaacgtttcccaatgaaatggtacaatccgatacattgcattttgttatatttttttttaaagaggctggtaacaacgcatcgcttcgtttacatggctcgtaccaacaataatagggtaatcttgtatctattcctatccgtactatgcttttatcaggataaatacatttacatcgtatatcgtctttgttagcatcacagaatgcataaatttgttcgtccgtcatgataaaaatttaaagtgtaaatataactattatttttatagttgtaataaaaagggaaatttgattgtatactttcggttctttaaaagaaactgacttgataaaaatggctgtaatctctaaggttacgtatagtctatatgatcaaaaagagattaatgctacagatattatcattagtcatgttaaaaatgacgacgatatcggtaccgttaaagatggtagactaggtgctatggatggggcattatgtaagacttgtgggaaaacggaattggaatgtttcggtcactggggtaaagtaagtatttataaaactcatatagttaagcctgaatttatttcagaaattattcgtttactgaatcatatatgtattcactgcggattattgcgttcacgagaaccgtattccgacgatattaacctaaaagagttatcgggacacgctcttaggagattaaaggataaaatattatccaagaaaaagtcatgttggaacagcgaatgtatgcaaccgtatcaaaaaattactttttcaaagaaaaaggtttgtttcgtcaacaagttggatgatattaacgttcctaattctctcatctatcaaaagttaatttctattcatgaaaagttttggccattattagaaattcatcaatatccagctaacttattttatacagactactttcccatccctccgctgattattagaccggctattagtttttggatagatagtatacccaaagagaccaatgaattaacttacttattaggtatgatcgttaagaattgtaacttgaatgctgatgaacaggttatccagaaggcggtaatagaatacgatgatattaaaattatttctaataacacttccagtatcaatttatcatatattacatccggcaaaaataatatgattagaagttatattgtcgcccgacgaaaagatcagaccgctagatctgtaattggtcccagtacatctatcaccgttaatgaggtaggaatgcccgcatatattagaaatacacttacagaaaagatatttgttaatgcctttacagtggataaagttaaacaactattagcgtcaaaccaagttaaattttactttaataaacgattaaaccaattaacaagaatacgccaaggaaagtttattaaaaataaaatacatttattgcctggtgattgggtagaagtagctgttcaagaatatacaagtattatttttggaagacagccgtctctacatagatacaacgtcatcgcttcatctatcagagctaccgaaggagatactatcaaaatatctcccggaattgccaactctcaaaatgctgatttcgacggagatgaagaatggatgatattggagcaaaatcctaaagccgtaattgaacaaagtattcttatgtatccgacgacgttactcaaacacgatattcatggagcccccgtttatggatctattcaagatgaaatcgtagcagcgtattcattgtttagaatacaagatctttgtttagatgaagtattgaacatcttggggaaatatggaagaaagttcgatcctaaaggtaaatgtaaattcagcggtaaagatatctatacttacttgataggtgaaaagattaattatccgggtctcttaaaggatggtgaaattattgcaaacgacgtagatagtaattttgttgtggctatgaggcatctgtcattggctggactcttatccgatcataagtcgaacgtggaaggtatcaactttattatcaagtcatcttatgtttttaagagatatctatctatttacggttttggggtgacattcaaagatctgagaccaaattcgacgttcactaataaattggaggccatcaacgtagaaaaaatagaacttatcaaagaagcatacgccaaatatctcaacgatgtaagagacgggaaaatagttccattatctaaagctttagaggcggactatgtggaatccatgttatccaacttgacaaatcttaatatccgagagatagaagaacatatgagacaaacgctgatagatgatccagataataacctcctgaaaatggccaaagcgggttataaagtaaatcccacagaactaatgtatattctaggtacttatggacaacagaggattgatggtgaaccagcagagactcgagtattgggtagagtcttaccttactatcttccagactctaaggatccagaaggaagaggttatattcttaattctttaacaaaaggattaacaggttctcaatattacttttcgatgctggttgccagatctcaatctactgatatcgtctgtgaaacatcacgtaccggaacactggctagaaaaatcattaaaaagatggaggatatggtggtcgacggatacggacaagtagttataggtaatacgctcatcaagtacgccgccaattataccaaaattctaggctcagtatgtaaacctgtagatcttatctatccagatgagtccatgacttggtatttggaaattagtgctctgtggaataaaataaaacagggattcgtttactctcagaaacagaaacttgcaaaaaagacattggcgccgtttaatttcctagtattcgtcaaacccaccactgaggataatgctattaaggttaaggatctgtacgatatgattcataacgtcattgatgatgtgagagagaaatacttctttacggtatctaatatagattttatggagtatatattcttgacgcatcttaatccttctagaattagaattacaaaagaaacggctatcactatctttgaaaagttctatgaaaaactcaattatactctaggtggtggaactcctattggaattatttctgcacaggtattgtctgagaagtttacacaacaagccctgtccagttttcacactactgaaaaaagtggtgccgtcaaacaaaaacttggtttcaacgagtttaataacctgactaatttgagtaagaataagaccgaaattatcactctggtatccgatgatatctctaaacttcaatctgttaagattaatttcgaatttgtatgtttgggagaattaaatccaaacatcactcttcgaaaagaaacagataggtatgtagtagatataatagtcaatagattatacatcaagagagcagaaattaccgaattagtcgtcgaatatatgattgaacgatttatctcctttagcgtcattgtaaaggaatggggtatggagacattcattgaggacgaggataatattagatttactgtctacctaaatttcgttgaaccggaagaattgaatcttagtaagtttatgatggttcttccgggtgccgccaacaagggcaagattagtaaattcaagattcctatctctgactatacgggatatgacgacttcaatcaaacaaaaaagctcaataagatgactgtagaactcatgaatctaaaagaattgggttctttcgatttggaaaacgtcaacgtgtatcctggagtatggaatacatacgatatcttcggtatcgaggccgctcgtgaatacttgtgcgaagccatgttaaacacctatggagaagggttcgattatctgtatcagccttgtgatcttctcgctagtttactatgtgctagttacgaaccagaatcagtgaataaattcaagttcggcgcagctagtactcttaagagagctacgttcggagacaataaagcattgttaaacgcggctcttcataaaaagtcagaacctattaacgataatagtagctgccacttttttagcaaggtccctaatataggaactggatattacaaatactttatcgacttgggtcttctcatgagaatggaaaggaaactatctgataagatatcttctcaaaagatcaaggaaatggaagaaacagaagacttttaattcttatcaataacatatttttctatgatctgtcttttaaacgatggattttccacaaatgcgcctctcaagtccctcatagaatgatacacgtataaaaaatatagcataggcgatgactccttatttttagacattagatatgccaaaatcatagccccgcttctatttactcccgcagcacaatgaaccaacacgggctcgtttcgttgatcacatttagataaaaaggcggtcacgtcgtcaaaatatttactaatatcggtagttgtatcatctaccaacggtatatgaataatattaatattagagttaggcaatgtatatttatccatcgtcaaatttaaaacatatttgaacttaacttcagatgatggtgcatccatagcatttttataatttcccaaatacacattattggttacccttgtcattatagtgggagatttggctttgtgcatatctccagttgaacgtagtagtaagtatttatacaaacttttcttatccatttataacgtacaaatggataaaactactttatcggtaaacgcgtgtaatttagaatacgttagagaaaaggctatagtaggcgtacaagcagccaaaacatcaacacttatattctttgttattatattggcaattagtgcgctattactctggtttcagacgtctgataatccagtctttaatgaattaacgagatatatgcgaattaaaaatacggttaacgattggaaatcattaacggatagcaaaacaaaattagaaagtgatagaggtaaacttctagccgctggtaaggatgatatattcgaattcaaatgtgtggatttcggcgcctattttatagctatgcgattggataagaaaacatatctgccgcaagctattaggcgaggtactggagacgcgtggatggttaaaaaggcggcaaaggtcgatccatctgctcaacaattttgtcagtatttgataaaacacaagtctaataatgttattacttgtggtaatgagatgttaaatgaattaggttatagcggttattttatgtcaccgcattggtgttccgattttagtaatatggaatagtgttagataaatgcggtaacaaatgttcctgtaaggaaccataacagcttagatttaacgttaaagatgagcataaacataataaacaaaattacaatcaaacctataacattaatatcaaacaatccaaaaaatgaaatcagtggagtagtaaacgcgtacataactcctggataacgtttagcagctgccgttcctattctagaccaaaaattcggtttcatgttttcgaagcggtgttctgcaacaagtcggggatcgtgttctacatatttggcggcattatccagtatctgcctattgatcttcatttcgttttcgattctggctatttcaaaataaaatcccgatgatagacctccagactttataatttcatctacgatgttcagcgccgtagtaactctaataatataggctgataagctaacatcataccctcctgtatatgtgaatatggtatgatttttgtccattacaagctcggttttaactttattgcctgtaataatttctctcatctgtaggatatctatttttttgtcatgcattgccttcaagacgggacgaagaaacgtaatatcctcaataacgttatcgttttctacaataactacatattctacctttttattttctaactcggtaaaaaaattagaatcccatagggctaaatgtctagcgatatttcttttcgtttcctctgtacacatagtgttacaaaaccctgaaaagaagtgagtatacttgtcatcatttctaatgtttcctccagtccactgtataaacgcataatccttgtaatgatctggatcatccttgactaccacaacatttcttttttctggcataacttcgttgtcctttacatcatcgaacttctgatcattaatatgctcatgaacattaggaaatgtttctgatggaggtctatcaataactggcacaacaataacaggagttttcaccgccgccatttagttattgaaattaatcatatacaactctttaatacgagttatattttcgtctatccattgtttcacatttacatatttcgacaaaaagatataaaatgcgtattccaatgcttctctgtttaatgaattactaaaatatacaaacacgtcactgtctggcaataaatgatatcttagaatattgtaacaatttattttgtattgcacatgttcgtgatctatgagttcttcttcgaatggcataggatctccgaatctgaaaacgtataaataggagttagaataataatatttgagagtattggtaatatataaactctttagcggtataattagtttttttctctcaatttctatttttagatgtgatggaaaaatgactaattttgtagcattagtatcatgaactctaatcaaaatcttaatatcttcgtcacacgttagctctttgaagtttttaagagatgcatcagttggttctacagatggagtaggtgcaacaattttttgttctacacatgtatgtactggagccattgttttaactataatggtgcttgtatcgaaaaactttaatgcagatagcggaagctcttcgccgcgactttctacatcgtaattgggttctaacgccgatctctgaatggatactagttttctaagttctaatgtgattctctgaaaatgtaaatccaattcctccggcattatagatgtgtatacatcggtaaataaaactatagtatccaacgatcccttctcgcaaattctagtcttaaccaaaaaatcgtatataaccacggagatggcgtatttaagagtggattcttctaccgttttgttcttggatgtcatataggaaactataaagtccgcactactgttaagaatgattactaacgcaactatatagttcaaattaagcattttggaaacataaaataactctgtagacgatacttgactttcgaataagtttgcagacaaacgaagaaagaacagacctctcttaatttcagaagaaaactttttttcgtattcctgacgtctagagtttatatcaataagaaagttaagaattagtcggttaatgttgtatttcattacccaagtttgagatttcataatattatcaaaagacatgataatattaaagataaagcgctgactatgaacgaaatagctatatggttcgctcaaaaatatagtcttgttaaacgtggaaacgataactgtatttttaatcacgtcagcggcatctaaattaaatataggtatatttattccacacactctacaatatgccacaccatcttcataataaataaattcgttagcaaaattattaattttagtgaaatagttagcgtcaactttcatagcttccttcaatctaatttgatgctcacacggtgcgaattctactctaacatcccttttccatgcctcaggttcatcgatctctataatatctagttttttgcgtttcacaaacacaggctcgtctctcgcgatgagatctgtatagtaactatgtaaatgataactagatagaaagatgtagctatatagatgacgatcctttaagagaggtataataactttaccccaatcagatagactgttgttatggtcttcggaaaaagaatttttataaatttttccagtattttccaaatatacgtacttaacatctaaaaaatccttaatgataataggaatggataatccgtctattttataaagaaatacatatcgcacattatacttttttttggaaatgggaataccgatgtgtctacataaatatgcaaagtctaaatattttttagagaatcttagttggtccaaattcttttccaagtacggtaatagatttttcatattgaacggtatcttcttaatctctggttctagttccgcattaaatgatgaaactaagtcactatttttataactaacgattacatcacctctaacatcatcatttaccagaatactgatcttcttttgtcgtaaatacatgtctaatgtgttaaaaaaaagatcatacaagttatacgtcatttcatctgtggtattcttgtcattgaaggataaactcgtactaatctcttctttaacagcctgttcaaatttatatcctatatacgaaaaaatagcaaccagtgtttgatcatccgcgtcaatattctgttctatcgtagtgtataacaatcgtatatcttcttctgtgatagtcgatacgttataaaggttgataacgaaaatatttttatttcgtgaaataaagtcatcgtaggattttggacttatattcgcgtctagtagatatgcttttatttttggaatgatctcaattagaatagtctctttagagtccatttaaagttacaaacaactaggaaattggtttatgatgtataatttttttagtttttatagattctttattctatacttaaaaaatgaaaataaatacaaaggttcttgagggttgtgttaaattgaaagcgagaaataatcataaattatttcattatcgcgatatccgttaagtttgtatcgtaatggcgtggtcaattacaaataaagcggatactagtagcttcacaaagatggctgaaatcagagctcatctaaaaaatagcgctgaaaataaagataaaaacgaggatattttcccggaagatgtaataattccatctactaagcccaaaaccaaacgagccactactcctcgtaaaccagcggctactaaaagatcaaccaaaaaggaggaagtggaagaagaagtagttatagaggaatatcatcaaacaactgaaaaaaattctccatctcctggagtcggcgacattgtagaaagcgtggctgctgtagagctcgatgatagcgacggggatgatgaacctatggtacaagttgaagctggtaaagtaaatcatagtgctagaagcgatctttctgacctaaaggtggctaccgacaatatcgttaaagatcttaagaaaattattactagaatctctgcagtatcgacggttctagaggatgttcaagcagctggtatctctagacaatttacttctatgactaaagctattacaacactatctgatctagtcaccgagggaaaatctaaagttgttcgtaaaaaagttaaaacttgtaagaagtaaatgcgtgcacttttttataaagatggtaaactctttaccgataataattttttaaatcctgtatcagacgataatccagcgtatgaggttttgcaacatgttaaaattcctactcatttaacagatgtagtagtatatgaacaaacgtgggaagaggcattaactagattaatttttgtgggaagcgattcaaaaggacgtagacaatacttttacggaaaaatgcatgtacagaatcgcaacgctaaaagagatcgtatttttgttagagtatataacgttatgaaacgaattaattgttttataaacaaaaatataaagaaatcgtccacagattccaattatcagttggcggtttttatgttaatggaaactatgttttttattagatttggtaaaatgaaatatcttaaggagaatgaaacagtagggttattaacactaaaaaataaacacatagaaataagtcccgatgaaatagttatcaagtttgtaggaaaggacaaagtttcacatgaatttgttgttcataagtctaatagactatataaaccgctattgaaactgacggatgattctagtcccgaagaatttctgttcaacaaactaagtgaacgaaaggtatacgaatgtatcaaacagtttggtattagaatcaaggatctccgaacgtatggagtcaattatacgtttttatataatttttggacaaatgtaaagtccatatctcctcttccgtcaccaaaaaagttaatagcgttaactatcaaacaaactgctgaagtggtaggtcatactccatcaatttcaaaaagagcttacatggcaacgactattttagaaatggtaaaggataaaaattttttagatgtagtatctaaaactacgttcgatgaattcctatctatagtcgtagatcacgttaaatcatctacggatggatgatatagatctttacacaaataattacaagaccgataaatggaaatggataagcgtataaaatctctcgcaatgacagctttcttcggagagctaaacacattagatattatggcattgataatgtctatatttaaacgccatccaaacaataccattttttcagtggataaggatggtcagtttatgattgatttcgaatacgataattataaggcttctcaatatttggatctgaccctcactccgatatctggagatgaatgcaagactcacgcatcgagtatagccgaacaattggcgtgtgcggatattattaaagaggatattagcgaatatatcaaaactactccccgtcttaaacgatttataaaaaaataccgcaatagatcagatactcgcatcagtcgagatacagaaaagcttaaaatagctctagctaaaggcatagattacgaatatataaaagacgcttgttaataagtaaatgaaaaaaaactagtcgtttataataaaacacgatatggatgccaacgtagtatcatcttctactattgcaacgtatatagacgctttagcgaagaatgcttcagaattagaacagaggtctaccgcatacgaaataaataatgaattggaactagtatttattaagccgccattaattactttgacaaatgtagtgaatatctctacgattcaggaatcgtttattcgatttaccgttactaataaggaaggtgttaaaattagaactaagattccattatctaaggtacatggtctagatgtaaaaaatgtacagttagtagatgctatagataacatagtttgggaaaagaaatcattagtgacggaaaatcgtcttcacaaagaatgcttgttgagactatcgacagaggaacgtcatatatttttggattacaagaaatatggatcctctatccgactagaattagtcaatcttattcaagcaaaaacaaaaaactttacgatagactttaagctaaaatattttctaggatccggtgcccagtctaaaagttctttattacacgctattaatcatccaaagtcaaggcctaatacatctctggaaatagaattcacacctagagacaatgaaaaagttccatatgatgaactaataaaggaattgacgactctatcacgtcatatatttatggcttctccagagaatgtaattctttctccgcctattaacgcacctataaagacttttatgttgcctaaacaagatatagtaggtctggatctggaaaatctatacgctgtaactaagactgacggcattcctataactatcagagttacatcaaacgggttgtattgttattttacacatcttggttatattattagatatcctgttaagagaataatagattccgaagtagtagtctttggtgaggcagttaaggataagaactggaccgtatatctcattaagctaatagagcctgtgaatgcaatcaatgatagactagaagaaagtaagtatgttgaatctaaactagtggatatttgtgatcggatagtattcaagtcaaagaaatacgaaggtccgtttactacaactagtgaagtcgtcgatatgttatctacatatttaccaaagcaaccagaaggtgttattctgttctattcaaagggacctaaatctaacattgattttaaaattaaaaaggaaaatactatagaccaaactgcaaatgtagtatttaggtacatgtccagtgaaccaattatctttggagaatcgtctatctttgtagagtataagaaatttagcaacgataaaggctttcctaaagaatatggttctggtaagattgtgttatataacggcgttaattatctaaataatatctattgtttggaatatattaatacacataatgaagtgggtattaagtccgtggttgtacctattaagtttatagcagaattcttagttaatggagaaatacttaaacctagaatcgataaaaccatgaaatatattaactcagaagattattatggaaatcaacataatatcatagtcgaacatttaagagatcaaagcatcaaaataggagatatctttaacgaggataaactatcggatgtgggacatcaatacgccaataatgataaatttagattaaatccagaagttagttattttacgaataaacgaactagaggaccgttgggaattttatcaaactacgtcaagactcttcttatttctatgtattgttccaaaacatttttagacgattccaacaaacgaaaggtattggcgattgattttggaaacggtgctgacctggaaaaatacttttatggagagattgcgttattggtagcgacggatccggatgctgatgctatagctagaggaaatgaaagatacaacaaattaaactctggaattaaaaccaagtactacaaatttgactacattcaggaaactattcgatccgatacatttgtctctagtgtcagagaagtattctattttggaaagtttaatatcatcgactggcagtttgctatccattattcttttcatccgagacattatgctaccgtcatgaataacttatccgaactaactgcttctggaggcaaggtattaatcactaccatggacggagacaaattatcaaaattaacagataaaaagacttttataattcataagaatttacctagtagcgaaaactatatgtctgtagaaaaaatagctgatgatagaatagtggtatataatccatcaacaatgtctactccaatgactgaatacattatcaaaaagaacgatatagtcagagtgtttaacgaatacggatttgttcttgtagataacgttgatttcgctacaattatagaacgaagtaaaaagtttattaatggcgcatctacaatggaagatagaccgtctacaaaaaactttttcgaactaaatagaggagccattaaatgtgaaggtttagatgtcgaagacttacttagttactatgttgtttatgtcttttctaagcggtaaataataatatggtatgggttctgatatccccgttctaaatgcattaaataattccaatagagcgatttttgttcctataggaccttccaactgtggatactctgtattgttaatagatatattaatacttttgtcgggtaacagaggttctacgtcttctaaaaataaaagtttgataacatctggcctgttcataaataaaaacttggcgattctatatatactcttattatcaaatctagccattgtcttatagatgtgagctactgtaggtgtaccatttgattttctttctaatactatatatttctctcgaagaagttcttgcacatcatctgggaataaaatactactgttgagtaaatcagttattttttttatatcgatattgatggacatttttatagttaaggataataagtatcccaaagtcgataacgacgataacgaagtatttatacttttaggaaatcacaatgactttatcagattaaaattaacaaaattaaaggagcatgtatttttttctgaatatattgtgactccagatacatatggatctttatgcgtcgaattaaatgggtctagttttcagcacggtggtagatatatagaggtggaggaatttatagatgctggaagacaagttagatggtgttctacatccaatcatatatctgaagatatacccgaagatatacacactgataaatttgtcatttatgatatatacacttttgacgctttcaagaataaacgattggtattcgtacaggtacctccgtcgttaggagatgatagtcatttgactaatccgttattgtctccgtattatcgtaattcagtagccagacaaatggtcaatgatatgatttttaatcaagattcatttttaaaatatttattagaacatctgattagaagccactatagagtttctaaacatataacaatagttagatacaaggataccgaagaattaaatctaacgagaatatgttataatagagataagtttaaggcgtttgtattcgcttggtttaacggcgtttcggaaaatgaaaaggtactagatacgtataaaaaggtatctaatttgatataatgaattcagtgactgtatcacacgcgccatatactattacttatcacgatgattgggaaccagttatgagtcaattggtagagttttataacgaagtagccagttggctgctacgagacgagacgtcgcctattcctgataagttctttatacagttgaaacaaccgcttagaaataaacgagtatgtgtgtgtggtatagatccgtatccgaaagatggaactggtgtaccgttcgaatcaccaaattttacaaaaaaatcaattaaggagatagcttcatctatatctagattaaccggagtaattgattataaaggttataaccttaatataatagacggggttataccctggaattattacttaagttgtaaattaggagaaacaaaaagtcacgcgatctactgggataagatttccaagttactgctgcagcatataactaaacacgttagtgttctttattgtttgggtaaaacagatttctcgaatatacgggcaaagttagaatccccggtaactaccatagtgggatatcatccagcggctagagaccgccaattcgagaaagatagatcatttgaaattatcaacgttttactggaattagacaacaaggtacctataaattgggctcaagggtttatttattaatgctttagtgaaattttaacttgtgttctaaatggatgcggctattagaggtaatgatgttatctttgtccttaagactataggtgtcccatcagcatgtagacaaaatgaagatccaagattcgtagaagcatttaaatgcgacgagttaaaaagatatattgataataatccagaatgtacactattcgaaagtcttagggatgaggaagcatactctatagtcagaattttcatggatgtagatttagacgcgtgtctagacgaaatagattatttaacggctattcaagattttattatcgaggtgtcaaactgtgtagctagattcgcgtttacagaatgcggtgccattcatgaaaatgtaataaaatccatgagatctaatttttcattgactaagtctacaaatagagataaaacaagttttcatattatctttttagacacgtataccactatggatacattgatagctatgaaacgaacactattagaattaagtagatcatctgaaaatccactaacaagatcgatagacactgccgtatataggagaaaaacaactcttcgggttgtaggtactaggaaaaatccaaattgcgacactattcatgtaatgcaaccaccgcatgataatatagaagattacctattcacttacgtggatatgaacaacaatagttattacttttctctacaacgacgattggaggatttagttcctgataagttatgggaaccagggtttatttcattcgaagacgctataaaaagagtttcaaaaatattcattaattctataataaactttaatgatctcgatgaaaataattttacaacggtaccactggtcatagattacgtaacaccttgtgcattatgtaaaaaacgatcgcataaacatccgcatcaactatcgttggaaaatggtgctattagaatttacaaaactggtaatccacatagttgtaaagttaaaattgttccgttggatggtaataaactgtttaatattgcacaaagaattttagacactaactctgttttattaaccgaacgaggagactatatagtttggattaataattcatggaaatttaacagcgaagaacccttgataacaaaactaattctgtcaataagacatcaactacctaaggaatattcaagcgaattactctgtccgaggaaacgaaagactgtagaagctaacatacgagacatgttagtagattcagtagagaccgatacctatccggataaacttccgtttaaaaatggtgtattggacctggtagacggaatgttttactctggagatgatgctaaaaaatatacgtgtactgtatcaaccggatttaaatttgacgatacaaagttcgtcgaagacagtccagaaatggaagagttaatgaatatcattaacgatatccaaccattaacggatgaaaataagaaaaatagagagctatatgaaaaaacattatctagttgtttatgtggtgctaccaaaggatgtttaacattcttttttggagaaactgcaactggaaagtcgacaaccaaacgtttgttaaagtctgctatcggtgacctgtttgttgagacgggtcaaacaattttaacagatgtattggataaaggacctaatccatttatcgctaacatgcatttgaaaagatctgtattctgtagcgaactacctgattttgcctgtagtggatcaaagaaaattagatctgataatattaaaaagttgacagaaccttgtgtcattggaagaccgtgtttctccaataaaattaataatagaaaccatgctacaatcattatcgatactaattacaaacctgtctttgataggatagataacgcattaatgagaagaattgccgtcgtgcgattcagaacacacttttctcaaccttctggtagagaggctgctgaaaataatgacgcgtacgataaagtcaaactattagacgaggggttagatggtaaaatacaaaataatagatatagatttgcatttctatacttgttggtgaaatggtacaaaaaatatcatgttcctattatgaaactatatcctacacccgaagagattcctgactttgcattctatctcaaaataggtactctgttagtatctagctctgtaaagcatattccattaatgacggacctctccaaaaagggatatatattgtacgataatgtggttactcttccgttgactactttccaacagaaaatatccaagtattttaattctagactatttggacacgatatagagagcttcatcaatagacataagaaatttgccaatgttagtgatgaatatctgcaatatatattcatagaggatatttcatctccgtaaatatatgctcatatatttatagaagatatcacatatctaaatgaataccggaattatagatttatttgataatcatgttgatagtataccaactatattacctcatcagttagctactctagattatctagttagaactatcatagatgagaacagaagcgtgttattgttccatattatgggatcaggtaaaacaataatcgctttgttgttcgccttggtagcttccagatttaaaaaggtttacattctagtgccgaacatcaacatcttaaaaattttcaattataatatgggtgtagctatgaacttgtttaatgacgaattcatagctgagaatatctttattcattccacaacaagtttttattctcttaattataacgataacgtcattaattataacggattatctcgctacaataactctatttttatcgttgatgaggcacataatatctttgggaataatactggagaacttatgaccgtgataaaaaataaaaacaagattccttttctactattgtctggatctcccattactaacacacctaatactctgggtcatattatagatttaatgtccgaagagacgatagattttggtgaaattattagtcgtggtaagaaagtaattcagacacttcttaacgaacgaggtgtgaatgtacttaaggatttgcttaaaggaagaatatcatattacgaaatgcctgataaagatctaccaacgataagatatcacggacgtaagtttctagatactagagtagtatattgtcacatgtctaaacttcaagagagagattatatgattactagacgacagctatgttatcatgaaatgtttgataaaaatatgtataacgtgtcaacggcagtattgggacaacttaatctgatgaataatttagatactttatttcaggaacaggataaggaattgtacccaaatctgaaaataaataatggcgtgttatacggagaagaattggtaacgttaaacattagttccaaatttaagtactttatcaatcggatacagacactcaacggaaaacattttatatacttttctaattctacatatggtggattggtaattaaatatatcatgctcagtaatggatattctgaatataatggttctcagggaactaatccacatatgataaacggcaaaccaaaaacatttgctatcgttactagtaaaatgaaatcgtctttagaggatctattagatgtgtataattctcctgaaaacgatgatggtagtcaattgatgtttttgttttcatcaaacattatgtccgaatcctatactctgaaagaggtaaggcatatttggtttatgactatcccagatactttttctcaatacaaccaaattcttggacgatctattagaaaattctcttacgccgatatttctgaaccagttaatgtatatcttttagccgccgtatattccgatttcaatgacgaagtaacgtcattaaacgattacacacaggatgaattaattaatgttttaccatttgacatcaaaaagctgttgtatctaaaatttaagacgaaagaaacgaatagaatatactctattcttcaagagatgtctgaaacgtattctcttccaccacatccatcaattgtaaaagttttattgggagaattggtcagacaatttttttataataattctcgtattaagtataacgactccaagttacttaaaatggttacatcagttataaaaaataaagaagacgctaggaattacatagatgatattgtaaacggtcacttctttgtatcgaataaagtatttgataaatctcttttatacaaatacgaaaacgatattattacagtaccgtttagactttcctacgaaccatttgtttggggagttaactttcgtaaagaatataacgtggtatcttctccataaaactgatgagatatataaagaaataaatgtcgagctttgttaccaatggatacctttccgttacattggaacctcatgagctgacgttagacataaaaactaatattaggaatgccgtatataagacgtatctccatagagaaattagtggtaaaatggccaagaaaatagaaattcgtgaagacgtggaattacctctcggcgaaatagttaataattctgtagttataaacgttccgtgtgtaataacctacgcgtattatcacgttggggatatagtcagaggaacattaaacatcgaagatgaatcaaatgtaactattcaatgtggagatttaatctgtaaactaagtagagattcgggtactgtatcatttagcgattcaaagtactgcttttttcgaaatggtaatgcgtatgacaatggcagcgaagtcactgccgttctaatggaggctcaacaaggtatcgaatctagttttgtttttctcgcgaatatcgtcgactcataagaaagagaatagcggtaagtataaacacgaatactatggcaataattgcgaatgttttattcccttcgatatatttttgataatatgaaaaacatgtctctctcaaatcggacaaccatctcataaaatagttctcgcgcgctggagaggtagttgctgctcgtataatctccccagaataatatacttgcgtgtcgtcgttcaatttatacggatttctatagttctctgttatataatacggttttccatcatgattagacgacgacaatagtgttctaaatttagatagttgatcagaatgaatgtttattggcgttggaaaaattatccatacagcgtctgcagagtgcttgatagttgttcctagatatgtaaaataatccaacgtactaggtagcaaattgtctagataaaatactgaatcaaacggcgcagacgtattagcggatctaatggaatccaattgattgactatcttttgaaaatatacatttttatgatccgatacttgtaagaatatagaaataatgataagtccatcatcgtgtttttttgcctcttcataagaactatattttttcttattccaatgaacaagattaatctctccagagtatttgtacacatctatcaagtgattggatccataatcgtcttcctttccccaatatatatgtagtgatgataacacatattcattggggagaaaccctccacttatatatcctcctttaaaattaatccttactagttttccagtgttctggatagtggttggtttcgactcattataatgtatgtctaacggcttcaatcgcgcgttagaaattgcttttttagtttctatattaataggagatagttgttgcggcatagtaaaaatgaaatgataactgtttaaaaatagctcttagtatgggaattacaatggatgaggaagtgatatttgaaactcctagagaattaatatctattaaacgaataaaagatattccaagatcaaaagacacgcatgtgtttgctgcgtgtataacaagtgacggatatccgttaataggagctagaagaacttcattcgcgttccaggcgatattatctcaacaaaattcagattctatctttagagtatccactaaactattacggtttatgtactacaatgaactaagagaaatctttagacggttgagaaaaggttctatcaacaatatcgatcctcacttcgaagagttaatattattgggtggtaaactagataaaaaggaatctattaaagattgtttaagaagagaattaaaagaggaaagtgatgaacgtataacagtaaaagaatttggaaatgtaattctaaaacttacaacacgggataaattatttaataaagtatatataagttattgcatggcgtgttttattaatcaatcgttggaggatttatcgcatactagtatttacaatgtagaaattagaaagattaaatcattaaatgattgtattaacgacgataaatacgaatatctgtcttatatttataatatgctagttaatagtaaatgaacttttacagatctagtataattagtcagattattaagtataatagacgactagctaagtctattatttgcgaggatgactctcaaattattacactcacggcattcgttaaccaatgcctatggtgtcataaacgagtatccgtgtccgctattttattaactactgataacaaaatattagtatgtaacagacgagatagttttctctattctgaaataattagaactagaaacatgtttagaaagaaacgattatttctgaattattccaattatttgtccaaacaggaaagaagtatactatcgtcatttttttctctatatccagctactgctgataatgatagaatagatgctatttatccgggtggcatacccaaaaggggtgagaatgttccagagtgtttatccagggaaattaaagaagaagttaatatagacaattcttttgtattcatagacactcggttttttattcatggcatcatagaagataccattattaataaattttttgaggtaatcttctttgtcggaagaatatctctaacgagtgatcaaatcattgatacatttaaaagtaatcatgaaatcaaggatctaatatttttagatccgaattcaggtaatggactccaatacgaaattgcaaaatatgctctagatactgcaaaactcaaatgttatggccatagaggatgttattacgaatcattaaaaaaattaactgaggatgattgattagaaaatataaattaatttaccatcgtgtatttttataacgggattgtccggcatatcatgtagatagttaccgtctacatcgtatactcgaccatctacgcctttaaatcctctatttattgacattaatctattagaattggaataccaaatattagtaccctcaattagtttattggtaatattttttttagacgatagatcgatggctcttgaaaccaaggttttccaaccggactcattgtcgatcggtgagaagtctttttcattagcatgaatccattctaatgatgtatgtttaaacactctaaacaattggacaaattcttttgatttgctttgaatgatttcaaataggtcttcgtctacagtaggcataccattagataatctagccattataaagtgcacgtttacatatctacgttctggaggagtaagaacgtgactattgagacgaatggctcttcctactatctgacgaagagacgcctcgttccaagtcatatctagaatgaagatatcattgattgagaagaagctaataccctcgcctccactagaagagaatacgcatgttttaatgcattctccgttagtgtttgattcttggttaaactcagccaccgccttgattctagtatcttttgttctagatgagaactctatattagagataccaaagactttgaaatatagtaataagatttctattcctgactgattaacaaatggttcaaagactagacatttaccatgggatgctaatattcccaaacatacatctataaatttgacgcttttctcttttaattcagtaaatagagagatatcagccgcactagcatcccctttcaatagttctccctttttaaaggtatctaatgcggatttagaaaactctctatttcttaatgaatttttaaaatcattatatagtgttgctatctcttgcgcgtattcgcccggatcacgattttgtctttcaggaaagctatcgaacgtaaacgtagtagccatacgtctcagaattctaaatgatgatatacctgtttttatttcagcgagtttagccttttgataaatttcttcttgctttttcgacatattaacgtatcgcattaatactgttttcttagcgaatgatgcagacccttctacgtcatcaaaaatagaaaactcgttattaactatgtacgaacataggcctcctagtttggagactaattctttctcatcaactagacgtttattctcaaatagcgattggtgttgtaaggatcctggtcgtagtaagttaaccaacatggtgaattcttgcacactattgacgataggtgtagccgataaacaaatcatcttatggttttttaacgcaatggttttagataaaaaattatatactgaacgagtaggacggatcttaccatcttctttgattaatgatttagaaatgaagttatgacattcatcaataatgacgcatattctactcttggaattaatagttttgatattagtaaaaaatttatttctaaaattttgatcatcgtaattaataaaaatacaatccttcgttatctctggagcgtatctgagtatagtgttcatccaaggatcttctatcaaagcctttttcaccaataagataatagcccaattcgtataaatatccttaagatgtttgagaatatatacagtagtcattgttttaccgacacccgtttcatggaacaataaaagagaatgcatactgtctaatcctaagaaaactcttgctacaaaatgttgataatccttgaggcgtactacgtccgaccccatcatttcaacaggcatattagtagttctgcgcaatgcataatcgatataggccgcgtgtgatttactcatttatgagtgataagtaataactatgttttaaaaatcacagcagtagtttaactagtcttctctgatgtttgttttcgatacttttcgaatcagaagtcatactagaataaagcagcgagtgaacgtaatagagagcttcgtatactctattcgaaaactctaagaacttattaatgaattccgtatccactggatcgtttaaaatactaaattgaacactgttcacatccttccaagaagaagacttagtgacggacttaacatgagacataaataaatccaaattttttttacaaacatcactagccaccataatggcgctatctttcaaccagctatcgcttacgcattttagcagtctaacatttttaaagagactacaatatattctcatagtatcgattacacctctaccgaataaagttggaagtttaataatacaatatttttcgtttacaaaatcaaataatggtcgaaacacgtcgaaggttaacatcttataatcgctaatgtatagattgttttcagtgagatgattattagatttaatagcatctcgttcacgtttgaacagtttattgcgtgcgctgaggtcggcaactacggcgtccgctttagtactcctcccataatactttacgctattaatctttaaaatttcatagactttatctagatcgctttctggtaacatgatatcatgtgtaaaaagttttaacatgtcggtcggcattctatttagatcattaactctagaaatctgaagaaagtaattagctccgtattccagactaggtaatgggcttttacctagagacagattaagttctggcaatgtttcataaaatggaagaaggacatgcgttccctcccggatattttttacaatttcatccatttacaactctatagtttgttttcattattattagttattatctcccataatcttggtaatacttaccccttgatcgtaagataccttatacaggtcattacatacaactaccaattgtttttgtacataatagattggatggttgacatccatggtggaataaactactcgaacagatagtttatctttccccctagatacattggccgtaatagttgtcggcctaaagaatatctttggtgtaaagttaaaagttagggttcttgttccattattgctttttgtcagtagttcattataaattctcgagatgggtccgttctctgaatatagaacatcatttccaaatctaacttctagtctagaaataatatcggtcttattcttaaaatctattcccttgatgaagggatcgttaatgaacaaatccttggcctttgattcggctgatctattatctccgttatagacgttacgttgactagtccaaagacttacaggaatagatgtatcgatgatgttgatactatgtgatatgtgagcaaagattgttctcttagtggcatcactatatgttccagtaatggcggaaaactttttagaaatgttatatataaaagaattttttcgtgttccaaacattagcagattagtatgaagataaacactcatattatcaggaacattatcaatttttacatacacatcagcatcttgaatagaaacgataccatcttctggaacctctacgatctcggcagactccggataaccagtcggtgggccatcactaacaataactagatcatccaacaatctactcacatatgcatctatataatctttttcatcttgtgagtaccctggatacgaaataaatttattatccgtatttccataataaggtttagtataaacagagagcgatgttgccgcatgaacttcagttacagtcgccgttggttggtttatttgacctattactctcctaggtttctctataaacgatggtttaatttgtacattcttaaccatatatccaataaagctcaattcaggaacataaacaaattctttgttgaacgtttcaaagtcgaacgaagagtcacgaataacgatatcggatactggattgaaggttaccgttacggtaatttttgaatcggatagtttaagactgctgaatgtatcttccacatcaaacggagttttaatataaacgtatactgtagatggttctttaatagtgtcattaggagttaggccaatagaaatatcattaagttcactagaatatccagagtgtttcaaagcaattgtattattgatacaattattatataattcttcgccctcaatttcccaaataacaccgttacacgaagagatagatacgtgattaatacatttatatccaacatatggtacgtaaccgaatcttcccatacctttaacttctggaagttccaaactcagaaccaaatgattaagcgcagtaatatactgatccctaatttcgaagctagcgatagcctgattgtctggaccatcgtttgtcataactccggatagagaaatatattgcggcatatataaagttggaatttgactatcgactgcgaagacattagaccgtttaatagagtcatccccaccgatcaaagaattaatgatagtattattcattttctatttaaaatggaaaaagcttacaataaactccgtagagaaatatctataatttgtgagttttccttaaagtaacagcttccgtaaacgccgtctttatctcttagtaagtttattgtatttataaccttttccttatcttcatagaatactaaaggcaacaaagaaatttttggttcttctctaagagctacgtgagacttaaccatagaagccaacgaatccctacatattttagaacagaaataccctacttcaccacccttgtatgtctcaatactaataggtctaaaaaccaaatcttgattacaaaaccaacacttatcaattacactatttgtcttaatagacacatctgccatagatttataatactttggtagtatacaagcgagtgcttcttctttagcgggcttaaagactgctttaggtgctgaaataaccacatctggaaggcttactcgcttagccatttaattacggaactatttttttatacttctaatgagcaagtagaaaacctctcatctacaaaaacgtactcgtgtccataatcctctaccatagtaacacgttttttagatctcatatgtgctaaaaagttttcccatactaattggttactattatttttcgtataatttttaacagtttgaggttttagatttttagttacagaagtgatatcgaatattttatccaaaaagaatgagtaattaattgtcttagaaggagtgttttcttggcaaaagaataccaagtgcttaaatatttctactacttcattaatcttttctgtactcagattcagtttctcatcttttacttgattgattatttcaaagactaacttataatcctttttatttattctctcgttagccttaagaaaactagatacaaaatttgcatctacatcatccgtggatatttgatttttttccatgatatccaagagttccgagataatttctccagaacattgatgagacaataatctccgcaatacatttctcaaatgaataagtttattagacacgtggaagtttgactttttttgtacctttgtacatttttgaaataccgactcgcaaaaaatacaatattcatatccttgttcagatactataccgttgtgtctacaaccgctacataatcgtagattcatgttaacactctacgtatctcgtcgtccaatattttatataaaaacattttatttctagacgttgccagaaaatcctgtaatatttttagttttttgggctgtgaataaagtatcgccctaatatggttaccgtcctccgccaatatagtagttaaattatccgcacatgcagaagaacacgcttaggcggattcagtacaatgttatatttttcgtaccaactcatttaaatatcataatctaaaatagttctgtaatatgtctagcgctaatatattgatcataatcctgtgcataaattaagatacaacaatgtctcgaaatcatcgacatggcttcttccatagttagaagatcgtcgtcaaagttagcaacgtgattcatcaacatttgctgttttgaggcagcaaatactgaaccatcgccattcaaccattcataaaaaccatcgtctgaatccattgataatttcttgtactggtttttgagagctcgcatcaatctagcatttctagctcccggattgaaaacagaaagaggatcgtacatccagggtccattttctgtaaatagaatcgtataatgtcccttcaagaagatatcagacgatccacaatcaaagaattggtctccgagtttgtaacaaactgcggactttaacctatacatgataccgtttagcataatttctggtgatacgtcaatcggagtatcatctattagagatctaaagccggtgtaacattctccaccaaacatattcttattctgacgtcgttctacataaaacatcattgctccattaacgataacaggggaatgaacagcactacccatcacattagttcccaatggatcaatgtgtgtaactccagaacatcttccatatcctatgttaggaggagcgaacaccactcttccactattgccatcgaatgccatagaataaatatccttggaattgatagaaatcggactgtcggatgttgtgatcatcttcataggattaacaacgatgtatggtgccgcctgaagtttcatatcgtaactgatgccgtttataggtctagccacagaaaccaacgtaggtctaaatccaactatagacaaaatagaagccaatatctgttcctcatctgtcataacttgagagcatccagtatgaataatcttcattagatggggatctaccgcatcatcatcgttacaataaaaaattcccattctaatgttcataattgcttttctaatcatggtatgcatgtttgctctctgaatctctgtggaaattagatctgatacacctgtaatcactatcggattatcctccgtaagacgattaaccaacaacatataattataagactttacttttctaaattcataaagttgctggattaggctataggtgtctccatgtacatacgcgttctcgagcgcaggaagtttaataccgaatagtgccatcagaataggatgaatatagtaattagtttctggttttctataaataaaagacaaatcttgtgaactagacatatcggtaaaatgcatggattggaatcgtgtagtcgacagaagaatatgatgattagatggagagtatattttatctaactctttgagttggtcaccgattctaggactagctcgagaatgaataagtactaaaggatgagtacatttcacagaaacactagcattgttcaatgtgctctttacatgggtaaggagttgaaatagctcgtttctatttgttctgacaatatttagtttattcataatgttaagcatatcctgaatagtaaagttagatgtgtcatacttgttagtagttagatatttagcaattgcattcccatcatttctcaatctcgtactccaatcatgtgtagatgctacttcatctatagaaaccatacaatcctttttgataggctgttgagattgattatttcctgcacgtttaggtttggtacgttgatttctagcccctgcggatataaagtcatcgtctacaatttgggacaatgaattgcatacactacaagacaaagatttatcagaagtgtgaatatgatcttcatctaccaaagaaagagtttgattagtataactagattttagtcctgcgttagatgttaaaaaaacatcgctattgaccacggcttccattatttatattcgtagtttttactcgaaagcgtgattttaatatccaatcttattacttttggaatcgttcaaaacctttgactagttgtagaatttgatctattgccctacgcgtatactcccttgcatcatatacgttcgtcaccagatcgtttgtttcggcctgaagttggtgcatatctttttcaacactcgacatgagatccttaagggccatatcgtctagattttgttgagatgctgctcctggatttggattttgttgtgctgttgtacatactgtaccaccagtaggtgtaggagtacatacagtggccacaataggaggttgaggaggtgtaaccgttggagtagtacaagaaatatttccatccgattgttgtgtacatgtagttgttggtaacgtctgagaaggttgggtagatggcggcgtcgtcgttttttgatctttattaaatttagagataatatcctgaacagcattgctcggcgtcaacgctggaaggagtgaactcgccggcgcatcagtatcttcagacagccaatcaaaaagattagacatatcagatgatgtattagtttgttgtcgtggttttggtgtaggagcagtactactaggtagaagaataggagccggtgtagctgttggaaccggctgtggagttatatgaatagttggttgtagcggttggataggctgtctgctggcggccatcatattatctctagctagttgttctcgcaactgtctttgataatacgactcttgagactttagtcctatttcaatcgcttcatcctttttcgtatccggatccttttcttcagaataatagattgacgactttggtgtagaggattctgccagcccctgtgagaacttgttaaagaagtccatttaaggctttaaaattgaattgcgattataagattaaatggcagacacagacgatattatcgactatgaatccgatgatctcactgaatacgaggatgatgaagaagaggaagaagatggagagtcactagaaactagtgatatagatcccaaatcttcttataagattgtagaatcagcatccactcatatagaagatgcgcattccaatcttaaacatatagggaatcatatatctgctcttaaacgacgctatactagacgtataagtctatttgaaatagcgggtataatagcagaaagctataacttgcttcaacgaggaagattacctctagtttcagaattttctgacgaaacgatgaagcaaaatatgctacatgtaattatacaagagatagaggagggttcttgtcctatagtcatcgaaaagaacggagaattgttgtcggtaaacgattttgacaaagatggtctaaaattccatctagactatattatcaaaatttggaaacttcaaaaacgatattagaatttatacgaatatcgttctctaaatgtcacaatcaagtctcgcatgttcagcaatttattgtcgtactttatatcgtgttcattaacgatatcttgcaaaatagtaatgattctatcttccttcgatagatattcttcagagattattgtcttatattctttcttgttatcagatatgaatttgataagactttgaacattattgatacccgtctgtttaattttttctacagatattttagttttggcagattctatcgtatctgtcaatagacatccaacatcgacattcgacgtcaattgtctataaatcaacgtataaattttagaaataacattagcgaattgttgtgcattgatgtcgttattctgaaacagtatgattttaggtagcattttcttaacaaagagaacgtatttattgttactcagttgaacagatgatatatccagattactaacgcatctgattccgtataccaaactttcagaagaaatggtatacaattgtttgtattcattcaatgtctctttttcagaaattagtttagagtcgaatactgcaataattttcaagagatagttttcatcagataagattttatttagtgtagatatgataaaactattgttttgttggagaacttgatacgccgcgttctctgtagtcgacgctctcaaatgggaaacaatctccattatttttttggaatcggatacaatatcttcggtatcttgacgcagtctagtatacatagagttaagagagattagagtttgtacattaagcaacatgtctctaaatgtggctacaaacttttccttttccacatcatctagtttattatataccgatttcacaacggcaccagatttaaggaaccagaatgaaaaactctgataactacaatatttcatcatagttacgattttatcatcttctatagttggtgtgatagcgcatacctttttctccaagactggaaccaacgtcataaaaatgtttaaatcaaaatccatatcaacatctgatgcgctaagaccagtctcgcgttcaagattatctttactaatggtgacgaactcatcgtataaaactctaagtttgtccattatttatttacagatttagttgtttaatttatttgtgctcttccagagttgggatagtatttttctaacgtcggtattatattattaggatctacgttcatatgtatcataatattaatcatccacgttttgataaatctatctttagcttctgaaataacgtatttaaacaaaggagaaaaatatttagctacggcatcagacgcaataacattttttgtaaatgtaacatatttagacgacagatcttcgttaaaaagttttccatctatgtagaatccatcagttgttaacaccattcccgcgtcagattgaataggagtttgaatagtttgttttggaaatagatccttcaataacttatagttgggtgggaaaaaatcgattttatcactagactctttcttttttactatcattacctcatgaactatttcttgaatgagtatatgtattttctttcctatatcggacgcgttcattggaaaatataccatgtcgttaactataagaatatttttatcctcgtttacaaactgaataatatcagatgtagttcgtaaacgaactatatcatcaccagcacaacatctaactatatgatatccactagtttcctttagtcgtttattatcttgttccatattagcagtcattccatcatttaagaaggcgtcaaagataatagggagaaatgacattttggattctgttacaactttaccaaaattaaggatatacggacttactatctttttctcaacgtcaatttgatgaacacacgatgaaaatgtacttcgatgagattgatcatgtagaaaacaacaagggatacaatatttccgcatatcatgaaatatattaagaaatcccaccttattatatttccccaaaggatccatgcacgtaaacattatgccgttatcattaataaagacttctttctcatcggatctgtaaaagttgttactgatttttttcattccaggatctagataattaataatgatgggttttctattcttattctttgtattttggcatatcctagaccagtaaacagtttccactttggtaaaatcagcagacttttgaacgctattaaacatggcattaatggcaataactaaaaatgtaaaatatttttctatgttaggaatatggtttttcactttaatagatatatggtttttggccaaaatgatagatatttttttatccgaggatagtaaaatattattagtcgccgtctctataaaaatgaagctagtctcgatatccaattttattctagaattgataggagtcgccaaatgtaccttatacgttatatctcccttgatgcgttccatttgtgtatctatatcggacacaagatctgtaaatagttttacgttattaatcatcacggtatcgccgtcgctagataatgctaatgtaccatccaagtcccaaatggagagatttaactgttcatcgtttagaataaaatgattaccggtcatattaataaagtgttcatcgtatctagataacaacgacttataattaatgtccaagtcttgaactcgctgaatgatcttttttaacccagttagttttagattggtacgaaatatattgttaaactttgattctacagtaatgtccaaatctagttgtggaaatacttccatcaacattgtttcaaacttgataatattattatctacatcttcgtacgatccaaattccggaatagatgtatcgcacgctctgaccacccagataaccaaaaagtcacacgctccaggatatacattgtataaaaagctatcgttttttagtagtgtttttttctgagtatatacgaagggattaaaaatagtattatcaacgtaactatattccaaattattcttatgagaatagataataatatcgtccttaatatctaacaaatttcctaaatatccctttaattgagtcattcgaagcgtcaatagaatatgtctcttaactatttccggctgttgtatatttaaatgacttcgtaaaaaataatatatgggcgacttctcatctatgtaatcatatggagtgagatatagggctcgttctacctcctgccccttacccacctgtaataccaattgcggacttactatatatcgcatatttatatcgtggggtaaagtgaaaatctactaccgatgatgtaagtcttacaatgttcgaaccagtaccagatcttaatttggaggcctccgtagaactaggggaggtaaatatagatcaaacaacacctatgataaaggagaatagcggttttatatcccgcagtagacgtctattcgcccatagatctaaggatgatgagagaaaactagcactacgattctttttacaaagactttattttttagatcatagagagattcattatttgttcagatgcgttgacgctgtaaaagacgtcactattaccaaaaaaaataacattatcgtggcgccttatatagcacttttaactatcgcatcaaaaggatgcaaacttacagaaacaatgattgaagcattctttccagaactatataatgaacatagtaagaaatttaaattcaactctcaagtatccatcatccaagaaaaactcggataccagtttggaaactatcacgtttatgattttgaaccgtattactctacagtagctctggctattcgagatgaacattcatctggcatttttaatatccgtcaagagagttatctggtaagttcattatctgaaataacatatagattttatctaattaatctaaaatctgatcttgttcaatggagtgctagtacgggcgctgtaattaatcaaatggtaaatactgtattgattacagtgtatgaaaagttacaactggtcatagaaaatgattcacaatttacatgttcattggctgtggaatcagaacttccaataaaattacttaaagatagaaatgaattatttacaaaattcattaacgagttaaaaaagaccagttcattcaagataagcaaacgcgataaggatacgctattaaaatattttacttaggactggagttagaatttatagacgactcatttcgtttatcattattactaccatcattattagtattcttcttgtcatcttgttcagaaatatacagcaatgctatacctaatactaaatacattatcatgctcgcaatggctctaacaacaacgaaccaaaatgaatttggtcgtagcttttgttcacaaaaatacataaagaaatgtctacataaatctatggcgccattggctacttgaaatagcgccagtcctcctacagattttaatatagctgtataacatgacatttattcatcatcaaaagagacagagtcaccatctgtcatatttagattttttttcatgtgttcaaagtatcctctactcatttcattataatagtttatcatacttagaattttaggacggatcaatgagtaagacttgactagatcgtcagtagtaatttgtgcatcgtctattctgcatccgcttcgtcgaataatgtatagcatcgctttgagattctccatagctatcaagtctttatacaatgacatggaaatatctgtgaatactttatacttctccaacatcgatgccttaacatcatcgcctactttagcattgaaaatacgttctattgtgtagatggatgtagcaagatttttaaacaacaatgccattttacacgatgattgcctcaagtctccaatcgtttgtttagaacgattagctacagagttcaacgcttggctgactagcatattattatctttagaaattgtattcttcaatgaggcgtttatcatatctgtgatttcgttagtcatattacagtctgactgggttgtaatgttatccaacatatcacctatggatacggtacacgtaccagcatttgtaataatcctatctaagatgttgtatggcattgcgcagaaaatatcttctcctgtaatatctccactctcgataaatctactcagattattcttaaatgccttattctctggagaaaagatatcagtgtccatcatttcattaatagtatacgcagaaaagataccacgagtatcaattctatccaagatacttatcggttccgagtcacagataatggtttcctctccttcgggagatcctgcatagaaatatctaggacaatagtttctatactgtctgtaactctgataatctctaaagtcactaactgataccatgaaattgagaagatcaaacgctgaagtaattaatttttctgcctcgtttttactacaactagttttcatcaatgtagtgacgatgtattgtttagttactcttggtctaatactgatgatagagatattattacttcccataatggatcttctagtagtcaccttaaagcccattgatgcaaatagcagatagataaagtcttggtatgactcctttctaatatagtacggactacctttgtcacccaactttatacccacataagccataacaacctctttaatagccgtttcatgaggtttatcagccatgagcctgagtagttggaagaatctcatgaatcccgtctcagaaagtcctatatgcatgatagatttatctttcctgggaaactctcgtatagtcatagatgaaatactcttcaaagtttctgaaataagattagtaacagtcttacctccgactactctaggtaacaaacaaactctaataggtgttttctctgcggagataatatcagaaaggatagagcaataagtagtattattgtgattataaagaccgaatacataacaggtagaatttataaacatcatgtcctgaaggtttttagacttgtattcctcgtaatccataccgtcccaaaacatggatttggtaactttgatagccgtagatctttgttccttcgccaacaggttaaagaaattaataaagaatttgttgtttctatttatgtccacaaattgcacgtttggaagcgccacggttacattcactgcagcattttgaggatcgcgagtatgaagtacgatgttattgtttactggtatatctggaaagaaatctaccagtctaggaataagagattgatatcgcatagaaatacaaaagttcataatctcatcatcgaagagcattttgttaccattgtaataaatatccactctgtcatatgtataaatgaagtactgttcaaacatgatgagatgtttatatgttggcatagtagtgagatcgacgtttggtaatggcaatgtattaagattaactccataatgtctagcagcatctgcgatgttataagtgttgtcaaagcggggtcgatcttgtgctgttatatattgtctaacacctataagattatcaaaatcttgtctgcttaatacaccgttaacaatttttgccttgaattcttttattggtgcattaataacatccttatagaggatgttaaacaaataagtattatcaaagttaagatctgggtatttcttttctgctagaacatccattgagtcggagccatctggtttaatataaccaccgataaatctagctctgtattctgtatccgtcaatctaatattaagaaggtgttgagtgaaaggtggaagatcgtaaaagctgtgagtattaatgataggattagtttccgaactaatgttaattggggtattaataatatctatatttccagcgttaagtgtaacattaaacagttttaattcacgtgacgtggtatcaattaaataattaatgcccaatttggatatagcagcctgaagctcatcttgtttagttacggatcctaatgagttattaagcaatatatcgaacggatgaacgaaggttgttttgagtttgtcgcatactttgtaatctagacatagatgcggaagaacggtagaaactatacgaaataaatattcagagtcctctaattgatcaagagtaactattgacttaataggcatcatttatttagtattaaatgacgaccgtaccagtgacggatatacaaaacgatttaattacagagttttcagaagataattatccatctaacaaaaattatgaaataactcttcgtcaaatgtctattctaactcacgttaacaacgtggtagatagagaacataatgccgccgtagtgtcatctccagaggaaatatcctcacaacttaatgaagatctatttccagatgatgattctccggccactattatcgaaagagtacaacctcatactactattattgacgatactccacctcctacgtttcgtagagagttattgatatcggaacaacgtcaacaacgagaaaaaagatttaatattacagtatcgaaaaatgctgaagcaataatggaatctagatctatgatatcttctatgccaacacaaacaccatccttgggagtagtttatgataaagataaaagaattcagatgttggaggatgaagtggttaatcttagaaatcaacgatctaatacaaaatcatctgataatttagataattttaccagaatactatttggtaagactccgtataaatcaacagaagttaataagcgtatagccatcgttaattatgcaaatttgaacgggtctcccttatcagtcgaggacttggatgtttgttcagaggatgaaatagatagaatctataaaacgattaaacaatatcacgaaagtagaaaacgaaaaattatcgtcactaacgtgattattattgtcataaacattatcgagcaagcattgctaaaactcggatttgaagaaatcaaaggactgagtaccgatatcacttcagaaattatcgatgtggagatcggagatgactgcgatgctgtagcatctaaactaggaatcggtaacagtccggttcttaatattgtattgtttatactcaagatattcgttaaacgaattaaaattatttaatttaatacattcccatatccagacaacaatcgtctggattaatctgttcctgtcgtctcataccggacgacatattaatctttttattagtaggcatctttttagatggtttctttttcccagcattaactgagtcgatacctagaagatcgtgattgatctctccgaccattccacgaacttctaattggccgtctctgacggtaccataaactattttaccagcattagtaacagcttggacaatctgaccatccatcgcattgtacgatgtagtagtaactgttgttctacgtctaggagcaccagaagtatttttggagcccttggaggttgatgtagaagaagacgaggattttgattttggtttacatgtaatacattttgaactctttgattttgtatcacatgcgccggcagtcacatctgtttgagaattaagattattgttgcctcctttgacggctgcatctccaccgatttgcgctagtagatttttaagctgtggtgtaatcttattaactgtttcgatataatcatcgtaactgcttctaacggctaaattttttttatccgccatttagaagctaaaaatatttttatttatacagaagatttaactagattatacaatgaactaatatgatccttttccagattatttacaaacttggtattttttggttctggaggaggcgaatttaaattcggacttggattcggattttgtgagttcttgatcttattatacatcgagtataggatggcgacggtaactgctacgcaaataccgatcaacaaaagaataccaatcatttattgacaataacttcactattgatcaagtatgcaatatatcatcttttcactaaataagtagtaataatgattcaacaatgtcgagatatatggacgataataatttagttcatggaaatatcgctatgattggtatgaatgactccgctaactctgtggggtgcgcagtgctttccccacatagaataaattagcattccgactgtgataataataccaagtataaacgccataatactcaatactttccatgtacgagtgggactggtagacttactaaagtcaataaaggcgaagatacacgaaagaatcaaaagaatgattccagcgattagcacgccggaaaaataatttccaatcataagcatcatgtccatttaactaataaaaattttaaatcgccgaatgaacaaagtggaatataaaccatataaaaacaatagtttgtactgcaaaaataatatctatttttgttttcgaagatatggtaaaattaaatagtagtacacagcatgttataactaacagcagcaacggctcgtaattacttatcatttactagacgaaaaggtggtgggatattttcttgctcaaataatacgaatatatcacccatccattttatgcgatgtttatatactctaatctttaatagatctatagacgacgggtttaccaacaatatagattttatcgattcatctaatttaaacccttccttaaacgtgaatgatctattatctggcataacgatgactctacctgatgaatcggacaatgtactgggccatgtagaataaattatcaacgaattatcgtctacgaacatttatatcatttgttttaattttaggacgcgaataaatagatataaaatagaaaataacagatattacaaccaatgttatggccgcgcccaaccaggtaggcagttttattttatcttttactacaggttctcctggatgatgtacgtcaccaacggcggacgtagttctagtacaattagacgtaagttctgcttgggaattttttaacgctaaagagttaacgttaatcgtgcacccaacgtatttacatctagttctttgaacatcttgattataatataaccattttctatctctagattcgtcggtgcactcatgtaaccaacataccctaggtcctaaatatttatctccggaattagattttggataattcgcgcaccaacaatttctatttcctttatgatcgttacaaaagacgtataatgccgtatccccaaaagtaaaataatcaggacgaataattctaataaactcagaacaatatctcgcatccatatgtttggagcaaatatcggaataagtagacatagccggtttccgttttgcacgtaaccattctaaacaattggggtttccaggatcgtttctacaaaatccagtcatgaaatcgtcacaatgttctgtcttgtaattattattaaatatttttggacagtgtttggtatttgtcttagaacaacattttgctacgctatcactatcgcccaggagataatccttttttataaaatgacatcgttgcccggatgctatataatcagtagcgtgttttaaatccttaatatattcaggagttacctcgttctgataatagattaatgatccaggacgaaatttgaaagaactacatggttctccatgaattaatacatattgtttagcaaattcaggaactataaaactactacaatgatctatcgacataccatctatcaaacaaaatttgggtttaatttctcccggagatgtttcataatagtacgtataactttcttctgcaaacttaacagctctattatattcaggataattaaaacctaattccatatatttgtctcgtatatctgctattcctggtgctattttgattctattaagagtaacagctgcccccattcttaataatcgtcagtatttaaactgttaaatgttggtatatcaacatctaccttatttcccgcagtataaggtttgttgcaggtatactgttcaggaatggttacatttatacttcttctatagtcctgtctttcgatgttcatcacatatgcaaagaacagaataaacaaaataatgtaagaaataatattaaatatctgtgaattcgtaaatacattgattgccataataattacagcagctacaatacacacaatagacattcccacagtgttgccattacctccacgatacatttgagttactaagcaataggtaataactaagctagtaagaggcaatagaaaagatgagataaatatcatcaatatagagattagaggagggctatatagagccaagacgaacaaaatcaaaccgagtaacgttctaacatcattatttttgaagattcccaaataatcattcattcctccataatcgttttgcatcatacctccatctttaggcataaacgattgctgctgttcctctgtaaataaatctttatcaagcactccagcacccgcagagaagtcgtcaagcatattgtaatatcttaaataactcatttatatattaaaaaatgtcactattaaagatggagtataatctttatgccgaactaaaaaaaatgacttgtggtcaacccctaagtctttttaacgaagacggggatttcgtagaagttgaaccgggatcatcctttaagtttctgatacctaagggattttacgcctctccttccgtaaagacgagtctagtattcgagacattaacaacgaccgataataaaatcactagtatcaatccaacaaatgcgccaaagttatatcctcttcaacgcaaagtcgtatctgaagtagtttctaatatgaggaaaatgatcgaatcaaaacgtcctctatacattactcttcacttggcgtgtggatttggtaagactattaccacgtgttatcttatggctacacacggtagaaaaaccgtcatttgcgtacccaataaaatgttaatacatcaatggaagacacaggtagaggcagtcggattggaacataagatatccatagatggagtaagtagtctattaaaggaactaaagactcaaagtccggatgtattaatagtagtcagtagacatctgacaaacgatgccttttgtaaatatatcaataagcattatgatttgttcatcttggatgaatcacatacgtataatctgatgaacaatacagcagttacaagatttttagcgtattatcctccgatgatgtgttattttttaactgctacacctagaccagctaaccgaatttattgtaacagtattattaatattgccaagttatccgatctaaaaaaaactatctatgcggtagatagtttttttgagccatattccacagataatattagacatatgataaaacgattagatggaccatctaataaatatcatatatatactgagaagttattatctgtagacgagcctagaaatcaacttattcttgataccctggtagaagaattcaagtcaggaactattaatcgaattttagttattactaaactacgtgaacatatggtattcttctacaaacgattattagatcttttcggaccagaggttgtatttataggagacgcccaaaatagacgtactccagatatggtcaaatcaatcaaggaactaaatagatttatattcgtatccaccttattttattccggtactggtttagatattcctagtttggattcgttgttcatttgctcggcagtaatcaacaatatgcaaatagagcaattactagggagggtatgtcgagaaacagaactattagataggacggtatatgtatttcctagcacatccatcaaagaaataaagtacatgataggaaatttcatgcaacgaattattagtctgtctgtagataaactaggatttaaacaaaaaagttatcggaaacatcaagaatccgatcccacttctgtatgtacaacatcctccagagaagaacgtgtattaaatagaatatttaactcgcaaaatcgttaagaagtttaagcgacgatccgcatgctgcgcaggccagtgtattacccctcatagtattaatataatccaatgatacttttgtgatgtcggaaatcttaaccaatttagactgacaggcagaacacgtcatgcaatcatcatcgtcatcgataactgtagtcttgggcttctttttgcggctcttcattccggaacgcacattggtgctatccatttaggtagtaaaaaataagtcagaatatgccctatagcacgatcgtgcaaaacctggtatatcgtctctatctttatcacaatatagtgtatcgacatctttattattattgacttcgtttatcttggaacatggaatgggaacatttttgttatcaacggccacctttgccttaattccagatgttgtaaaattataactaaacagtctatcatcgacacaaatgaaattcttgtttagacgtttgtagtttacgtatgcggctcgttcgcgtctcattttttcagatattgcaggtactataatattaaaaataagaatgaaataacataggattaaaaataaagttatcatgacttctagcgctgatttaactaacttaaaagaattacttagtctgtacaaaagtttgagattttcagattctgcggctatagaaaagtataattctttggtagaatggggaacatctacttactggaaaataggcgtgcaaaaggtagctaatgtcgagacgtcaatatctgattattatgatgaggtaaaaaataaaccgtttaatattgatccgggctattacattttcttaccggtatattttgggagcgtctttatttattcgaagggtaaaaatatggtagaacttggatctggaaactcttttcaaataccagatgatatgcgaagtgcgtgtaacaaagtattagacagcgataacggaatagactttctgagatttgttttgttaaacaatagatggataatggaagatgctatatcaaaatatcagtctccagttaatatatttaaactagctagtgagtacggattaaacatacccaaatatttagaaattgaaatagaggaagacacattatttgacgacgagttatactctattatagaacgctcttttgatgataaatttccaaaaatatccatatcgtatattaagttgggagaacttagacggcaagttgtagactttttcaaattctcgttcatgtatattgagtccatcaaggtagatcgtataggagataatatttttattcctagcgttataacaaaatcaggaaaaaagatattagtaaaagatgtagaccatttaatacgatccaaggttagagaacatacatttgtaaaagtaaaaaagaaaaacacattttccattttatacgactatgatggaaacggaacagaaactagaggagaagtaataaaacgaattatagacactataggacgagactattatgttaacggaaagtatttctctaaggttggtagtgcaggcttaaagcaattgactaataaattagatattaatgagtgcgcaactgtcgatgagttagttgatgagattaataaatccggaactgtaaaacgaaaaataaaaaaccaatcagcatttgatttaagcagagaatgtttgggatatccagaagcggattttataacgttagttaataacatgcggttcaaaatagaaaattgtaaggttgtaaatttcaatattgaaaatactaattgtttaaataacccgagtattgaaactatatatagaaactttaaccagttcgtctcaatctttaatgtcgtcaccgatgtcaaaaaaagattattcgagtgaaataatatgcgcctttgatataggtgcaaaaaatcctgccagaactgttttagaagtcaaggataactccgttagggtattggatatatcaaaattagactggagttctgattgggaaaggcgcatagctaaagatttgtcacaatatgaatacactacagttcttctagaacgtcagcctagaaggtcgccgtatgttaaatttatctattttattaaaggctttttatatcatacatcggctgccaaagttatttgcgtctcgcctgtcatgtctggtaattcatatagagatcgaaaaaagagatcggtcgaagcatttcttgattggatggacacattcggattgcgagactccgttccggatagacgcaaattagacgatgtagcggatagtttcaatttggctatgagatacgtattagataaatggaatactaattatacaccttataataggtgtaaatctaggaattacataaaaaaaatgtaataacgttagtaacgccattatggataatctatttacctttctacatgaaatagaagatagatatgccagaactatttttaactttcatctaataagttgcgatgaaataggagatatatatggtcttatgaaagaacgaatttcctcagaggatatgtttgataatatagtgtataataaagatatacatcatgccattaagaaactagtgtattgcgacatccaacttactaaacacattattaatcagaatacgtatccggtatttaacgattcttcacaagtgaaatgttgtcattatttcgatataaactcagataatagcaatattagctctcgtacagtagagatatttgagagggaaaagtcatctcttgtatcatatattaaaactaccaataagaagagaaaggtcaattacggcgaaataaagaaaactgttcatggaggcactaatgcaaattacttttccggtaaaaagtctgatgagtatctgagtactacagttagatccaacattaatcaaccttggatcaaaaccatttctaagagaatgagagtagatatcattaatcactctatagtaacgcgtggaaaaagctctatattacaaactatagaaattatttttactaatagaacatgtgtgaaaatattcaaggattctactatgcacattattctatccaaggacaaggatgaaaaggggtgtatacacatgattgacaaattattctatgtctattataatttatttctgttgttcgaagatatcatccaaaacgagtactttaaagaagtagctaatgttgtaaaccacgtacttacggctacggcattagatgagaaattattcctaattaagaaaatggctgaacacgatgtttatggagttagcaatttcaaaatagggatgtttaacctgacatttattaagtcgttggatcataccgttttcccctctctgttagatgaggatagcaaaataaagttttttaaggggaaaaagctcaatattgtagcattacgatctctggaggattgtataaattacgtgactaaatccgagaatatgatagaaatgatgaaggaaagatcgactattttaaatagcatagatatagaaacggaatcggtagatcgtctaaaagaattgcttctaaaatgaaaaaaaacactgattcagaaatggatcaacgactcggatataagtttttggtgcctgatcctaaagccggagttttttatagaccgttacatttccaatatgtatcgtattctaattttatattgcatcgattgcatgaaatcttgaccgtcaagcggccactcttatcgtttaagaataatacagaacgaattatgatagaaattagcaatgttaaagtgactcctccagattactcacctataatcgcgagtattaaaggtaagagttatgacgcattagccacgttcactgtaaatatctttaaagaggtaatgaccaaagagggtatatccatcactaaaataagtagttatgagggaaaagattctcatttgataaaaattccgctactaataggatacgggaataaaaatccacttgatacagccaagtatcttgttcctaatgtcataggtggagtctttatcaataaacaatctgtcgaaaaagtaggaattaatctagtagaaaagattacaacatggccaaaatttagggttgttaagccaaactcattcactttctcgttttcctccgtatcccctcctaatgtattaccgacaagatatcgccattacaagatatctctggatatatcacaattggaagcgttgaatatatcatcgacaaagacatttataacggtcaatattgttttgctgtctcaatatttatctagagtgagtctagaattcattagacgtagcttatcatacgatatgcctccagaagttgtctatctagtaaacgcgataatagatagtgctaaacgaattactgaatctattactgactttaatattgatacatacattaatgacctggtggaagctgaacacattaaacaaaaatctcagttaacgatcaacgagttcaaatatgaaatgctgcataactttttacctcatatgaactatacacccgatcaactaaagggattttatatgatatctttactaagaaagtttctctactgtatctaccacacttctagatatccagatagagattcgatggtttgtcatcgtatactaacatacggcaaatattttgagacgttggcacatgatgaattagagaattacataggcaacatccgaaacgatatcatgaacaatcacaagaacagaggcacttacgcggtaaacattcatgtactaacaactcctggacttaatcatgcattttctagcttattgagtggaaagttcaaaaagtcagacggtagttatcgaacacatcctcactattcatggatgcagaatatttctattcctaggagtgttggattttatccggatcaagtaaagatttcaaagatgttttctgtcagaaaataccatccaagtcaatatctttacttttgttcatcagacgttccggaaagaggtcctcaggtaggtttagtatctcaattgtctgtcttgagttccattacaaatatactaacgtctgagtatttggatttggaaaagaaaatttgtgagtatatcagatcatattataaagatgatataagttactttgaaacaggatttccaatcactatagaaaatgctctagtcgcatctcttaatccaaatatgatatgtgattttgtaactgactttagacgtagaaaacggatgggattcttcggtaacttggaggtaggtattactttagttagggatcacatgaatgaaattcgcattaatattggagcgggaagattagtcagaccattcttggttgtggataacggagagctcatgatggatgtgtgtccggagttagaaagcagattagacgatatgacattctctgacattcagaaagagtttccacatgtcatcgaaatggtagatatagaacaatttacttttagtaacgtatgtgaatcggttcaaaaatttagaatgatgtcaaaggatgaaagaaagcaatacgatttatgtgactttcctgccgaatttagagatggatatgtggcatcttcattagtgggaatcaatcacaattctggacccagagctattcttggatgtgctcaagctaaacaagctatctcttgtctgagttcggatatacgaaataaaatagacaatggaattcatttgatgtatccagagaggccaatcgtgattagtaaggctttagaaacttcaaagattgcggctaattgcttcggccaacatgttactatagcattaatgtcgtacaaaggtatcaatcaagaggatggaattatcatcaaaaaacaatttattcagagaggcggtctcgatatagttaccgcaaagaaacatcaagtagaaattccgttggaaaactttaataacaaagaaagagataggtctaatgcatattcgaaattagaaagtaatggattagttagactgaatgctttcttggaatccggagacgctatggcacgaaatatctcatcaagaactcttgaagatgattttgctagagataatcagattagcttcgatgtttccgagaaatataccgatatgtacaaatctcgcgttgaacgagtacaagtagaacttactgacaaagttaaggtacgagtattaaccatgaaagaaagaagacccattctaggagacaaatttaccactagaacgagtcaaaagggaacagtcgcgtatgtcgcggatgaaacggaacttccatacgatgaaaatggtatcacaccagatgtcattattaattctacatccatcttctctagaaaaactatatctatgttgatagaggttattttaacagccgcatattctgctaagccgtacaacaataagggagaaaaccgacctgtctgttttcctagtagtaacgaaacatccatcgatacatatatgcaattcgctaaacaatgttatgagcattcaaatccgaaattgtctgatgaagaattatcggataaaatcttttgtgaaaagattctctatgatcctgaaacggataagccttatgcatccaaagtattttttggaccaatttattacttgcgtctgaggcatttaactcaggacaaggcaaccgttagatgtagaggtaaaaagacgaagctcattagacaagcgaatgagggacgaaaacgtggaggaggtattaagtttggagaaatggagagagactgtttaatagcgcatggcgcagccaatactattacagaagttttgaaagattcggaagaagattatcaagatgtgtatgtttgtgaaaattgtggagacatagcagcacaaatcaagggtattaatacatgtcttagatgttcaaaacttaatctctctcctctcttaacaaaaattgataccacgcacgtatctaaagtatttcttactcaaatgaacgccagaggcgtaaaagtcaaattagatttcgaacgaaggcctccttcgttttataaaccattagataaagttgatctcaagccgtcttttctggtgtaatattctagtttggtagtagatacatatcaatatcatcaaattcgagatccgaattataaaatgggcgtggattgttaactatagaatcggacgtctgatattcgaaaatctgtggagtttcaggttttggtggaggtgtaactgctacttgggatactgaagtctgatattcagaaagctgggggatgttctggttcgacatccaccgatggtgtcacatcactaatcggttcggtaacgtctgtggatggaggtgctacttctacagaacctgtagcctcagttgtcaacggagatacatttttaatgcgaggaaatgtataatttggtaatggtttctcatgtggatctgaagaagaggtaagatatctactagaaagataccgatcacgttctagttctcttttgtagaacttaactttttctttctcagcatctagttgatattccaacctcttcacgttactacgttcagatttcaattcacgttcgcatgggttacctccgcagtttttacgagcgatttcacgttcagccttcatgcgtctctgtgatccgtttacgttaaaccataaatacatgggtgatcctataaacatgaatttatttctaattctcagagctatagttaattgaccgtgtaatatttgcttacatgcatacttgatacgctcattaataagatttttatcattgctcgttatctcagaatcgtatatataaggagtaccatcgtgattcttaccagatattatacaaaatactatatataaaatatattgaccaacgttagtaatcatataaatgtttaacgttttaaattttgtattcaatgatccattatcatacgctagcatggtcttatgatattcattctttaaaatataatattgtgttagccattgcattggagctcctaatggagattttctattctcgtccattttaggatatgctttcataaagtccctaataacttcgtgaataatgtttctatgttttctactgatgcatgtatttgcttcgatttttttatcccatgtttcatctatcatagatttaaacgcagtaatgctcgcaacattaacatcttgaaccgttggtacaattccgttccataaatttataatgttcgccatttatataactcattttttgaatatacttttaattaacaaaagagttaagttactcatatggacgccgtccagtctgaacatcaatctttttagccagagatatcatagccgctcttagagtttcagcgtgattttccaacctaaatagaacttcatcgttgcgtttacaacacttttctatttgttcaaactttgttgttacattagtaatctttttttccaaattagttagccgttgtttgagagtttcctcattgtcgtcttcatcggctttaacaattgcttcgcgtttagcctctggctttttatcagcctttgtagaaaaaaattcagttgctggaattgcaagatcgtcatctccggggaaaagagttccgtccatttaaagtacagattttagaaactgacactctgcgttatttatatttggtacaacacatggattataaatattgatgttaataacatcagaaaatgtaaagtctatacattgttgcatcgtgttaaattttctaatggatctagtattattgggtccaacttctgcctgaaatccaaatatggaagcggatacaaaaccgtttcctggataaaccacacatctccacttttgctttacatcagaaattgtgtcgttgacatcttgaactctcctatctaatgccggtgttccacctatagattttgaatattcgaatgctgcatgagtagcattaaattccttaatattgccataattttcatatattgagtaaccctggataaaaagtaaacacaccgcagccgtcgctaccacaataaaaaaaattgatagagagttcatttataatctattagaagctgacaaaatttttttacacgcatcagacaatgctttaataaatagttcaacatctacttttgtcatatcgaaccgatggtatgattctaacctagaattacatccgaaaaagttgactatgttcatagtcattaagtcattaacaaacaacattccagactctggattataagacgatactgtttcgtcacaatcacctaccttaatcatgtgattatgaatattggctattagagcaccttctaagaaatctataatatctttgaaacacgatttaaaatcaaaccacgaatatacttctacgaagaaagttagtttacccataggagagataactataaatggagatctaaatacaaaatccggatctatgatagttttaacattattatattctctattaaatacctccacatctaaaaatgttaattttgaaactatgtcttcgtttattaccgtacctgaactaaacgctataagctctattgtttgagaactctttaaacgatattcttgaaatacatgtaacaaagtttcctttaactcggtcggtttatctaccatagttacagaatttgtatccttatctataatataataatcaaaatcgtataaagttatataattatcgcgttcagattgggatcttttcaaatagactaaaaaccccatttctctagtaagtatcttatgtatatgtttgtaaaatatcttcatggtgggaatatgctctaccgcagttagccattcctcattgacagcggtagatgtattagacaaaactattccaatgtttaacaagggccattttacgagattattaaatccttgtttgataaatgtagccaatgagggttcgagttcaacgacgattgaattctcttcccgcggatgctgcatgatgaacgacgggatgttgttcgattgatttggaattctttttcgactttttgtttatattaaatattttaaaatttatagctgatagcaattcatgtaccacggataatgtagacgcgtattgcgcatcgatatctttattattagataaatttatcaataaatgtgagaagtttgcctcgttaaggtcttccatttaaatattatataaacatttgtgtttgtatcttattcgtcttttatggaatagttttttactagtaaagctgcaattacacactttgtccgtaaaacataaatataaacaccagcttttatcaatcgttccaaaaagtcgacggcggacatttttaacatggcatctattttaaatacacttaggtttttggaaaaaacatcattttataattgtaacgattcaataactaaagaaaagattaagattaaacataagggaatgtcatttgtattttataagccaaagcattctaccgttgttaaatacttgtctggaggaggtatatatcatgatgatttggttgtattggggaaggtaacaattaatgatctaaagatgatgctattttacatggatttatcatatcatggagtgacaagtagtggagtaatttacaaattgggatcgtctatcgatagactttctctaaataggactattgttacaaaagttaataattatgatgatacattttttgacgacgatgattgatcgctattgcacaattttgtttttttactttctaatatagcgtttagattctttttcatgtgcgaatattgatttactaaaatatcgatgtttaacttttgttctatgacgtccttatcggcggtatcggtacatatacgtaattcaccttcacaaaatacggagtcttcgataataatagccaatcgattattggatctagctgtctgtatcatattcaacatgtttaatatatcctttcgtttcccctttacaggcatcgatcgtagcatattttccgcgtctgagatggaaatgttaaaactacaaaaatgcgtaatgttagcccgtcctaatattggtacgtgtctataagtttggcatagtagaataatagacgtgtttaaatgccttccaaagtttaagaattctattagagtattgcattttgatagtttatcgcctacatcatcaaaaataagtaaaaagtgtgctgattttttatgattttgtgcgacagcaatacatttttctatgttacttttagttcgtatcagattatattctagagattcctgactactaacgaaattaatatgatttggccaaatgtatccatcataatctgggttataaacgggtgtaaacaagaatatatgtttatattttttaactagtgtagaaaacagagatagtaaatagatagtttttccagatccagatcctcccgttaaaaccattctaaacggcatttttaataaattttctcttgaaaattgtttttcttggaaacaattcataattatatttacagttactaaattaatttgataataaatcaaaatatggaaaactaaggtcgttagtagggaggagaacaaagaaggcatatcgtgatataaataacatttattatcatgatgacaccagaaaacgacgaagagcagacatctgtgttctccgctactgtttacggagacaaaattcaaggaaagaataaacgcaaacgcgtgattggtctatgtattagaatatctatggttatttcactactatctatgattaccatgtccgcgtttctcatagtgcgcctaaatcaatgcatgtctgctaacgaggctgctattactgacgccgctgttgccgttgctgctgcatcatctactcatagaaaggttgcgtctagcactacgcaatatgatcacaaagaaagctgtaatggtttatattaccagggttcttgttatatattacattcagactaccagttattctcggatgctaaagcaaattgcactgcggaatcatcaacactacccaataaatccgatgtcttgattacctggctcattgattatgttgaggatacatggggatctgatggtaatccaattacaaaaactacatccgattatcaagattctgatgtatcacaagaagttagaaagtatttttgtgttaaaacaatgaactaatatttatttttgtacattaataaatgaaatcgcttaatagacaaactgtaagtatgtttaagaagttgtcggtgccggccgctataatgatgatactctcaaccattattagtggcataggaacatttctgcattacaaagaagaactgatgcctagtgcttgcgccaatggatggatacaatacgataaacattgttatctagataccaacattaaaatgtccacagataatgcggtttatcagtgtcgtaaattacgagctagattgcctagacctgatactagacatctgagagtattgtttagtattttttataaagattattgggtaagtttaaaaaagaccaataataaatggttagatattaataatgataaagatatagatattagtaaattaacaaattttaaacaactaaacagtacgacggatgctgaagcgtgttatatatacaagtctggaaaactggttaaaacagtatgtaaaagtactcaatctgtactatgtgttaaaaaattctacaagtgacaacaaaaaatgaattaataataagtcgttaacgtacgccgccatggacgccgcgtttgttattactccaatgggtgtgttgactataacagatacattgtatgatgatctcgatatttcaatcatggactttataggaccatacattataggtaacataaaaactgtccaaatagatgtacgggatataaaatattccgacatgcaaaaatgctactttagctataagggtaaaatagttcctcaggattctaatgatttggctagattcaacatttatagcatttgtgccgcatacagatcaaaaaataccatcatcatagcatgcgactatgatatcatgttagatatagaagataaacatcagccattttatctattcccatctattgatgtttttaacgctacaatcatagaagcgtataacctgtatacagctggagattatcatctaatcatcaatccttcagataatctgaaaatgaaattgtcgtttaattcttcattctgcatatcagacggcaatggatggattataattgatgggaaatgcaatagtaattttttatcataaaagttgtaaagtaaataataaaacaataaatattgaactagtagtacgtatattgagcaatcagaaatgatgctggtacctcttatcacggtgacagtagttgcgggaacaatattagtatgttatatattatatatttgtaggaaaaagatacgtactgtctataatgacaataaaattatcatgacaaaattaaaaaagataaagagttctaattccagcaaatctagtaaatcaactgatagcgaatcagactgggaggatcactgtagtgctatggaacaaaacaatgacgtagataatatttctaggaatgagatattggacgatgatagcttcgctggtagtttaatatgggataacgaatccaatgttatggcgcctagcacagaacacatttacgatagtgttgctggaagcacgctgctaataaataatgatcgtaatgaacagactatttatcagaacactacagtagtaattaatgaaacggagactgttgaagtacttaatgaagataccaaacagaatcctaactattcatccaatcctttcgtaaattataataaaaccagtatttgtagcaagtcaaatccgtttattacagaacttaacaataaatttagtgagaataatccgtttagacgagcacatagcgatgattatcttaataagcaagaacaagatcatgaacacgatgatatagaatcatcggtcgtatcattggtgtgattagtttcctttttataaaattgaagtaatatttagtattattgctgccgtcacgttgtacaaatggagatattccctgtattcggcatttctaaaattagcaattttattgctaataatgactgtagatattatatagatacagaacatcaaaaaattatatctgatgagatcaatagacagatggatgaaacggtacttcttaccaacatcttaagcgtagaagttgtaaatgacaatgagatgtaccatcttattccccatagactatcgactattatactctgtattagttctgtcggaggatgtgttatctctatagataatgacgtcaatggcaaaaatattctaacctttcccattgatcatgctgtaatcatatccccactgagtaaatgtgtcgtagttagcaagggtcctacaaccatattggttgttaaagcggatatacctagcaaacgattggtaacatcgtttacaaacgacatactgtatgtaaacaatctatcactgattaattatttgccgttgtctgtattcattattagacgagttaccgactatttggatagacacatatgcgatcagatatttgcgaataataagtggtattccattataaccatcgacaataagcagtttcctattccatcaaactgtataggtatgtcctctgccaagtacataaattctagcatcgagcaagatactttaatacatgtttgtaacctcgagcatccattcgacttagtatacaaaaaaatgcagtcgtacaattctgtacctatcaaggaacaaatattgtacggtagaattgataatataaatatgagcattagtatttctgtgtattaatagatttctagtatggggatcattaatcatctctaatctctaaatacctcataaaacgaaaaaaaagctattatcaaatactgtacggaatggattcattctcttctctttttatgaaactctgttgtatatctactgataaaactggaagcaaaaaatctgatagaaagaataagaataagatcaagatcaaggattatatggaacacgattattataaaataacaatagttcctggttcctcttccacgtctactagctcgtggtattatactcatgcctagtaatagtctctttgcgttgacggaaagcagactagaaataacaggctaaaatgttcagacaccataatagttcccaacccagataataacagagtaccatcaacacattcctttaaactcaatcccaaacccaaaaccgttaaaatgtatccggccaattgatagtagataatgaggtgtacagcgcatgataatttacacagtaaccaaaatgaaaatactttagtaattataagaaatatagatggtaacgtcatcatcaacaatccaataatatgccggagagtaaacattgacggataaaacaaaaatgctccgcataactctatcatggcaataacacaaccaaatacttgtaagattcctaaattagtagaaaatacaacggatatcgatgtataagtgatctcgagaaataataagaataaagtaatgcccgtaaagataaacatcaacattgtttggtaatcattaaaccaattagtatgaagttgaactaatttcacagtagattttattccagtgttatcctcgcatgtataagtacctggtaagatatctttatattctataatcaatgagacatcactatccgataacgaatgaagtctagcactagtatgccatttacttaatattgtcgtcttggaagttttattataagttaaaatatcatggttatccaatttccatctaatatactttgtcggattatctatagtacacggaataatgatggtatcattacatgctgtatactctatggtctttgtagttgttataacaaccaacgtatagaggtatatcaacgatattctaactcttgacattttttatttatttaaaatgatacctttgttatttattttattctattttgctaacggtattgaatggcataagtttgaaacgagtgaagaaataatttctacttacttattagacgacgtattatacacgggtgttaatggggcggtatacacattttcaaataataaactaaacaaaactggtttaactaataataattatatcacaacatctataaaagtagaggatgcggataaggatacattagtatgcggaaccaataacggaaatcccaaatgttggaaaatagacggttcagacgacccaaaacatagaggtagaggatacgctccttatcaaaatagcaaagtaacgataatcagttacaacgaatgtgtactatctgacataaacatatcaaaagaaggaattaaacgatggagaagatttgacggaccatgtggttatgatttatacacggcggataacgtaattccaaaagatggtttacgaggagcattcgtcgataaagatggtacttatgacaaagtttacattcttttcactgatactatcggctcaaagagaattgtcaaaattccgtatatagcacaaatgtgcctaaacgacgaaggtggtccatcatcattgtctagtcatagatggtcgacgtttctcaaagtcgaattagaatgtgatatcgacggaagaagttatagacaaattattcattctagaactataaaaacagataatgatacgatactatatgtattcttcgatagtccttattccaagtccgcattatgtacctattctatgaataccattaaacaatctttttctacgtcaaaattggaaggatatacaaagcaattgccgtctccagctcctggtatatgtttaccagctggaaaagttgtttcacataccacgtttgaagtcatagaaaaatataatgtactagatgatattataaagcctttatctaaccaacctatcttcgaaggaccgtctggtgttaaatggttcgatataaaggagaaggaaaatgaacatcgggaatatagaatatacttcataaaagaaaattctatatattcgttcgatacaaaatctaaacaaactcgtagctcgcaagtcgatgcgcgactattttcagtaatggtaacttcgaaaccgttatttatagcagatatagggataggagtaggaatgccacaaatgaaaaaaatacttaaaatgtaatcttaatcgagtacaccacacgacaatgaacaaacctaagacagattatgctggttatgcttgctgcgtaatatgcggtctaattgtcggaattatttttacagcgacactattaaaagttgtagaacgtaaattagttcatacaccatcaatagataaaacgataaaagatgcatatattagagaagattgtcctactgactggataagctataataataaatgtatccatttatctactgatcgaaaaacctgggaggaaggacgtaatacatgcaaagctctaaatccaaattcggatctaattaagatagagactccaaacgagttaagttttttaagaagccttagacgaggctattgggtaggagaatccgaaatattaaaccagacaaccccatataattttatagctaaaaatgccacgaagaatggaaatatatttgtagcacaacgaatactcccaaactgcattcgtgttacactatataacaattacactacatttttatcataccactacttcggttagatgttttagaaaaaaataaatatcgccgtaccgttcttgtttttataaaaataacaattaacaattatcaaattttttctttaatattttacgtggttgaccattcttggtggtaaaataatctcttagtgttggaatggaatgctgtttaatgtttccgcactcatcgtatattttgacgtatgcagtcacatcgtttacgcaatagtcagactgtagttctatcatgcttcctacatcagaaggaggaacagttttaaagtctcttggttttaatctattgccattagttttcatgaaatcctttgttttatccacttcacattttaaataaatgtccactatacattcttctgttaattttactagatcgtcatgggtcatagaatttataggttccgtagtccatggatccaaactagcaaacttcgcgtatacggtatcgcgattagtgtatacaccaacagtatgaaaattaagaaaacagtttaatagatcaacagaaatatttaatcctccgtttgatacagatgcgccatatttatggatttcggattcacacgttgtttgtctgaggggttcgtctagcgttgcttctacgtaaacttcgattcccatatattctttattgtcagaatcgcataccgatttatcatcatacactgtttgaaaactaaatggtatacacatcaaaataataaataataacgagtacattctgcaatattgttatcgtaattggaaaaatagtgttcgagtgagttggattatgtgagtattggattgtatattttattttatattttatattttatattttgtaataagaataaaatgctaatgtcaagtttattccaatagatgtcttattaaaaaacatatataataaataacaatggctgaatggcataaaattatcgaggatatctcaaaaaataataagttcgaggatgccgccatcgttgattacaagactacaaagaatgttctagctgctattcctaacagaacatttgccaagattaatccgggtgaaattattcctctcatcactaatcgtaatattctaaaacctcttattggtcagaaatattgtattgtatatactaactctctaatggatgagaacacgtatgctatggagttgcttactgggtacgcccctgtatctccgatcgttatagcgagaactcataccgcacttatatttttgatgggtaagccaacaacatccagacgtgacgtgtatagaacgtgtagagatcacgctacccgtgtacgtgcaactggtaattaaaataaaaagtaatattcatatgtagtgtcaattttaaatgatgatgatgaaatggataatatccatattgacgatgtcaataatgccggtattggcatacagctcatcgatttttagatttcattcagaggatgtggaattatgttatgggcatttgtattttgataggatctataatgtagtaaatataaaatataatccgcatattccatatagatataattttattaatcgcacgttaaccgtagatgaactagacgataatgtcttttttacacatggttattttttaaaacacaaatatggttcacttaatcctagtttgattgtctcattatcaggaaacttaaaatataatgatatacaatgctcagtaaatgtatcgtgtctcattaaaaatttggcaacgagtacatctactatattaacatctaaacataagacttattctctacatcggtccacgtgtattactataataggatacgattctattatatggtataaagatataaatgacaagtataatgacatctatgattttactgcaatatgtatgctaatagcgtctacattgatagtgaccatatacgtgtttaaaaaaataaaaatgaactcttaattatgctatgctattagaaatggataaaatcaaaattacggttgattcaaaaattggtaatgttgttaccatatcgtataacttggaaaagataactattgatgttacaccaaaaaagaaaaggatgtattattagcgcaatcagttgctgtcgaagaggcaaaagatgtcaaggtagaagaaaaaaatattatcgatattgaagatgacgatgatatggatgtagaaagcgcgtaatactatctataaacataagtatataataaatactttttatttacggtactcttgtagtggtgataccctactcgattatttttttaaaaaaaaaatacttattctgattcttctaaccatttccgtgttcgtttgaatgccacatcgacgtcaaagataggggagtagttgaaatctagttctgcattgttggtacgcacctcaaatgtagtgttggatatcttcaacgtatagttgttgagtagtgatggttttctaaatagaattctcttcatatcattcttgcacgcgtacatttttagcatccatcttggaatcctagatccttgttctattcccaatggtttcatcaatagaagattaaacatatcgtacgaacacgatggagagtaatcgtagcaaaagtaagcatttcctttaatcttagatcccggatactggatatattttgcagccaacacgtgcatccatgcagcatttcctacatatacccggctatgtaccgcgttatcatcgactgtacgatacataatgttaccgtgttgcttacattgctcgtaaaagactttcgtcaatttgtctccttctccgtaaattccagtgggtcttaggcaacaagtatacaattttgctccattcatgattacggaattattggctttcataaccagttgctcggccatacgtttactttttgcgtatacatgtcctggtgatatatcataaagggtatgctcatggccgatgaatggatcaccgtgtttattgggtcctattgcttccatgctactagtatagatcaaatacttgattcctaggtccacacaagctgccaatatagtctgtgttccataatagtttactttcatgatttcattatcggtgtattttccaaatacatccactagagcagccgtatgaataatcagatttaccccatctagcgcttctctcaccttatcaaagtcgtttatatcacattgtatatagtttataaccttaactttcgaggttattggttgtggatcttctacaatatctatgactctgatttcttgaacatcatctgcactaattaacagttttactatatacctgcctagaaatccggcaccaccagtaaccgcgtacacggccattgctgccactcataatatcagactacttattctattttactaaataatggctgtttgtataatagaccacgataatatcagaggagttatttactttgaaccagtccatggaaaagataaagttttaggatcagttattggattaaaatccggaacgtatagtttgataattcatcgttacggagatattagtcaaggatgtgattccataggcagtccagaaatatttatcggtaacatctttgtaaacagatatggtgtagcatatgtttatttagatacagatgtaaatatatttacaattattggaaaggcgttatctatttcaaaaaatgatcagagattagcgtgtgaagttattggtatttcttacataaatgaaaagataatacattttcttacaattaacgagaatggcgtttgatatatcagttaatgcgtctaaaacaataaatgcattagtttacttttctactcagcaaaataaattagtcatacgtaatgaagttaatgatacacactacactgtcgaatttgatagggacaaagtagttgacacgtttatttcatataatagacataatgacaccatagagataagaggggtgcttccagaggaaactaatattggttgcgcggttaatacgccggttagtatgacttacttgtataataagtatagttttaaactgattttagcagaatatataagacacagaaatactatatccggcaatatttattcggcattgatgacactagatgatttggctattaaacagtatggagacattgatctattatttaatgagaaacttaaagtagactccgattcgggactatttgactttgtcaactttgtaaaggatatgatatgttgtgattctagaatagtagtagctctatctagtctagtatctaaacattgggaattgacaaataaaaagtataggtgtatggcattagcgaacatatatctgatagtattccaatatctgagctatctagactacgatacaatctatgtaagtatctacgcgggcacactgagagcatagaggatgaatttgattattttgaagacgatgattcgtctacatgttctgccgtaaccgacagggaaacggatgtataattttttttatagcgtgaaggatatgataaaaaatataattgttgtatttatcccattccaatcaccttatatgattctgtaaaaaaattatactgtaacacaataaaggagtcttatagatgtatagaggtcagatactggtttgataaactgtttattccacataagtatgtttgactttatggttagacccgcatactttaacaaatcactgaaaattggagttaggtattgacctctcagaatcagttgccgttctggaacattaaatgtattttttatgatatactccaacgcatttatgtgggcatacaacaagtcattactaatggagtattccaagagttttagttgtctagtatttaacaagagaagagatttcaacagactgtttatgaactcgaatgccgcctcattgtcgcttatattgatgatgtcgaattctcccaatatcatcaccgatgagtagctcatcttgttatcgggatccaagttttctaaagatgtcattaaaccctcgatcatgaatggatttatcatcatcgtttttatgttggacatgagcttagtccgtttgtccacatctatagacgacgatttctgaattatttcatatatccctctctttaactccaggaacttgtcaggatggtctactttaatatgttctcgtctaagagatgaaaatctttggatggttgcacgcgacttttctctaaaggatgacgttgcccaagatcctctcttaaatgaatccatcttatccttggacaagatggacagtctattttccttagatggtttaatatttttgttacccatgatctataaaggtagacctaatcgtctcggatgaccatatatttattttcagttttattatacgcataaattgtaaaaaatatgttaggtttacgaaaatgtctcgtggggcattaatcgtttttgaaggattggacaaatctggaaaaacaacacaatgtatgaacatcatggaatctataccggcaaacacgataaaatatcttaactttcctcagagatccactgtcactggaaagatgatagatgactatctaactcgtaaaaaaacctataatgatcatatagttaatctattattttgtgcaaatagatgggagtttgcatcttttatacaagaacaactagaacagggaattactttaatagttgatagatacgcattttctggagtagcgtatgccgccgctaaaggcgcgtcaatgactctcagtaagagttatgaatctggattgcctaaacccgacttagttatattcttggaatctggtagcaaagaaattaatagaaacgtcggcgaggaaatttatgaagatgttacattccaacaaaaggtattacaagaatataaaaaaatgattgaagaaggagatattcattggcaaattatttcttctgaattcgaggaagatgtaaagaaggagttgattaagaatatagttatagaggctatacacacggttactggaccagtggggcaactgtggatgtaatagtgaaattacattttttataaatagatgttagtacagtgttataaatggatgaagcatattactctggcaacttggaatcagtactcggatacgtgtccgatatgcataccgaactcgcatcaatatctcaattagttattgccaagatagaaactatagataatgatatattaaacaaggacattgtaaattttatcatgtgtagatcaaacttggataatccatttatctctttcctagatactgtatatactattatagatcaagagaactatcagactgagttgattaattcattagacgacaatgaaattatcgattgtatagttaataagtttatgagcttttataaggataacctagaaaatatagtagatgctatcatcactctaaaatatataatgaataatccagattttaaaactacgtatgccgaagtactcggttccagaatagccgatatagatattaaacaagtgatacgtaagaatatactacaattgtctaatgatatccgcgaacgatatttgtgaaaaatattaaaaaaaaatactttttttattaaatgacgtcgcttcgcgaatttagaaaattatgctgtgatatatatcacgcatcaggatataaagaaaaatctaaattaattagagactttataacagatagggatgataaatatttgatcattaagctattgcttcccggattagacgatagaatttataacatgaacgataaacaaattataaaattatatagtataatatttaaacaatctcaggaagatatgctacaagatttaggatacggatatataggagacactattaggactttcttcaaagaaaacacagaaatccgtccaagagataaaagcattttaactttagaagacgtggatagtttcttaactacgttatcatccgtaactaaagaatcgcatcaaataaaattattgactgatatcgcatccgtttgtacatgtaatgatttaaaatgtgtagtcatgcttattgataaagatctaaaaattaaagcgggtcctcggtacgtacttaacgctattagtcctaatgcctatgatgtgtttagaaaatctaataacttgaaagagataatagaaaattcatctaaacaaaatctagactctatatctatttctgttatgactccaattaatcccatgttagcggaatcgtgtgattctgtcaataaggcgtttaaaaaatttccatcaggaatgtttgcggaagtcaaatacgatggtgaaagagtacaagttcataaaaataataacgagtttgccttctttagtagaaacatgaaaccagtactctctcataaagtggattatctcaaagaatacataccgaaagcatttaaaaaagctacgtctatcgtattggattctgaaattgttcttgtagacgaacataatgtaccgctcccgtttggaagtttaggtatacacaaaaagaaagaatataaaaactctaacatgtgtttgttcgtgtttgactgtttgtactttgatggattcgatatgacggacattccattgtacgaacgaagatcttttctcaaagatgttatggttgaaatacccaatagaatagtattctcagagttgacgaatattagtaacgagtctcagttaactgacgtattggatgatgcactaacgagaaaattagaaggattggtcttaaaagatattaatggagtatacgaaccgggaaagagaagatggttaaaaataaagcgagactatttgaacgagggttccatggcagattctgccgatttagtagtactaggtgcctactatggtaaaggagcaaagggtggtatcatggcagtctttctaatgggttgttacgacgatgaatccggtaaatggaagacggtaactaaatgttccggtcacgatgataatacgttaagggttttgcaagaccaattaacgatgattaaaattaacaaggatcccaaaaaaattccagagtggttagtagttaataaaatctatattcccgattttgtagtagaggatccgaaacaatctcagatatgggaaatttcaggagcagagtttacatcttccaagtcccataccgcaaatggaatatccattagatttcctagatttactaggataagagaggataaaacgtggaaagaatctactcatctaaacgatttagtaaacttgactaaatcttaatagttacatacaaactgaaaattaaaataacaccatttagttggtggtcgccatggatggtgttattgtatactgtctaaacgcgttagtaaaacatggcgaggaaataaatcatataaaaaatgatttcatgattaaaccatgttgtgaaagagtttgtgaaaaagttaagaacgttcacattggcggacaatctaaaaacaatacagtgattgcagatttgccatatatggataatgctgtatcggatgtatgcaattcactgtataaaaagaatgtatcaagaatatccagatttgctaatttgataaagatagatgacgatgacaagactcctactggtgtatataattattttaaacctaaagatgttattcctgttatcatatctataggaaaggataaagatgtctgtgaactattaatctcatcagacatatcgtgtgcatgcgtggagttaaattcatataaagtagccattcttcccatggatgtttccttttttaccaaaggaaatgcatcattgattattctcctgtttgatttctctatcgatgcagcacctctcttaagaagtgtaaccgataataatgttattatatctagacaccagcgtctacatgacgagcttccgagttccaattggttcaagttttacataagtataaagtccgactattgttctatattatatatggttgttgatggatctgtgatgcatgcgatagctgataatagaactcacgcaattattagcaaaaatatattagacaatactacgattaacgatgagtgtagatgctgttattttgaaccacagattaggattcttgatagagatgagatgctcaatggatcatcgtgtgatatgaacagacattgtattatgatgaatttacctgatgtaggcgaatttggatctagtatgttggggaaatatgaacctgacatgattaagattgctctttcggtggctggtaatttaataagaaatcgagactacattcccgggagacgaggatatagctactacgtttacggtatagcctctagataatttttttaagcacgaaataaaaaacataattttaaaccaatctatttcatactattttgtgtgatcaccatggacataaagatagatattagtatttctggtgataaatttacggtgactactaggagggaaaatgaagaaagaaaaaaatatctacctctccaaaaagaaaaaactactgatgttatcaaacctgattatcttgagtacgatgacttgttagatagagatgagatgtctactattctagaggaatattttatgtacagaggtctattaggcctcagaataaaatatggacgactctttaacgaaattaaaaaattcgacaatgatgcggaagaacaattcggtactatagaagaactcaagcagaaacttagattaaattctgaagagggagcagataactttatagattatataaaggtacaaaaacaggatatcgtcaaacttactgtatacgattgcatatctatgataggattgtgtgcatgcgtggtagatgtttggagaaatgagaaactgttttctagatggaaatattgtttacgagctattaaactgtttattaatgatcacatgcttgataagataaaatctatactgcagaatagactagtatatgtggaaatgtcatagaaagttaaaagttaatgagagcaaaaatatataaggttgtattccatatttgttattttttctgtaatagttaaaaaaatacattcgatggtctatctatcagattattatgtgttataaggtactttttctcataataaactagagtatgagtaagatagtgtttttcaaaacatataaatctaaaattgatggatgagatatacagctattaatttcgaaaatatattttaatctgataactttaaacatggatttttgatggtggtttaacgttttaaaaaaagattttgttattgtagtatatgataatattaaaagatggatataaagaatttgctgactgcatgtactattttttacattactacattggctacggcagatatacctactccgccaccaacgggtcatgtgacaagggagaatatcttgataagaggcataatcaatgttgtaatcggtgtccacctggagaatttgccaaggttagatgtaatggtaacgataacacaaaatgtgaacgctgcccacctcatacatataccacaatcccaattattctaatggatgtcatcaatgtagaaaatgcccaacaggatcatttgataaggtaaagtgtaccggaacacagaacagtaaatgttcgtgtcttcctggttggtattgcgctactgattcttcacagactgaagattgttgaaattgtataccaaaaaggagatgtccatgcggatactttggtggaatagatgaacaaggaaatcctatttgtaaatcgtgttgtgttggtgaatattgcgactacctacgtaattatagacttgatccatttcctccatgcaaactatctaaatgtaattaattatgattttgatgataatgttaccatacattatatcgctacttggttagtgtattattcagtatgaagacctattaataattacttatcttttgacgatcttgttataattataatataaaaatacttatggcatagtaactcataattgctgacgcgataaattcgtaataatctgttttgttcaaaggaatctacaggcataaaaataaaaatataatttataatatactcttacaacgccatcatgaataacagcagtgaattgattgctgttattaatggatttagaaatagtggacgattttgtgatattaatatagttattaatgatgaaaggataaacgctcataaactcatcctatctggagcctccgaatatttttccattctgttttccaataattttatcgattctaatgaatacgaagttaatctaagtcatttagattatcaaagtgttaacgatttgatcgattacatttatgggatacctttgagcctaactaacgataacgtgaaatatattctttcaaccgctgattttttacaaattggatctgccattacggagtgtgaaaattacatacttaaaaatctttgttctaaaaactgtatcgatttctacatatacgctgataaatataataacaagaaaatagaatcagcgtcgtttaacacaatattacaaaatattttgagactcatcaacgatgaaaactttaaatacttaacagaggaatcaatgataaaaattttaagcgatgatatgttaaatataaaaaatgaggatttcgccccactaattctcattaaatggttagagagtactcaacaatcatgcaccgtcgagttacttaaatgcctcagaatatcattgctttccccacaagttataaaatcactttatagtcatcgactggttagttcaatctacgaatgtataacattcttaaacaatatagcattcttggatgaatcatttcctagataccatagcatcgagttgatatctatcggtataagtaattcgcgtgataaaatttccataaactgctacaatcataaaaaaaatacatgggaaatgatatcttcacgtagatataggtgtagtttcgcagtggccgtcctggataatattatttatatgatgggtggatatgatcagtccccgtatagaagttcaaaggttatagcgtacaatacatgtacaaattcttggatatatgatataccagagctaaaatatcctcgttctaattgtgggggactggctgatgacgaatacatttattgtataggcggcatacgcgatcaggattcatcgttgacatctagtattgataaatggaagccatcaaaaccatattggcagaagtatgctaaaatgcgcgaaccaaaatgtgatatgggggttgcgatgttaaacggattaatatatgttataggtggaatcgttaaaggtgacacgtgtaccgacgcactagagagtttatcagaagatggatggatgaagcatcaacgtcttccaataaaaatgtccaatatgtcgacgattgttcatgatggcaagatttatatatctggaggttacaacaatagtagtgtagttaatgtaatatcgaatctagtccttagctataatccgatatatgatgaatggaccaaattatcatcattaaacattcctagaattaatcccgctctatggtcagcgcataataaattatatgtaggaggaggaatatctgatgatgttcgaactaatacatctgaaacatacgataaagaaaaagattgttggacattggataatggtcacgtgttaccacgcaattatataatgtataaatgcgaaccgattaaacataaatatccattggaaaaaacacagtacacgaatgattttctaaagtatttggaaagttttataggtagttgatagaacaaaatacataattttgtaaaaataaatcactttttatactaatatgacacgattaccaatacttttgttactaatatcattagtatacgctacaccttttcctcagacatctaaaaaaataggtgatgatgcaactctatcatgtaatcgaaataatacaaatgactacgttgttatgagtgcttggtataaggagcccaattccattattcttttagctgctaaaagcgacgtcttgtattttgataattataccaaggataaaatatcttacgactctccatacgatgatctagttacaactatcacaattaaatcattgactgctagagatgccggtacttatgtatgtgcattctttatgacatcgcctacaaatgacactgataaagtagattatgaagaatactccacagagttgattgtaaatacagatagtgaatcgactatagacataatactatctggatctacacattcaccagaaactagttctgagaaacctgattatatagataattctaattgctcgtcggtattcgaaatcgcgactccggaaccaattactgataatgtagaagatcatacagacaccgtcacatacactagtgatagcattaatacagtaagtgcaacatctggagaatccacaacagacgagactccggaaccaattactgataaagaagaagatcatacagtcacagacactgtctcatacactacagtaagtacatcatctggaattgtcactactaaatcaaccaccgatgatgcggatctttatgatacgtacaatgataatgatacagtaccatcaactactgtaggtagtagtacaacctctattagtaattataaaaccaaggactttgtagaaatatttggtattaccgcattaattatattgtcggccgtggcaatattctgtattacgtattatatatgtaataaacgttcacgtaaatacaaaacagagaacaaagtctagatttttgacttacataaatgtctgggatagtaaaatctatcatattgagcggaccatctggttcaggaaagacagccatagccaaaagactatgggaatatatttggatttgtggtgtcccataccactagatttcctcgtcctatggaacgagaaggtgtcgattaccattacgttaacagagaggccatctggaagggaatagccgccggaaactttctagaacatactgagtttttaggaaatatttacggaacttctaaaactgctgtgaatacagcggctattaataatcgtatttgtgtgatggatttaaacatcgacggtgttagaagttttaaaaatacttacctaatgccttactcggtgtatataagacctacctctcttaaaatggttgagaccaagcttcgttgtagaaacactgaagctaacgatgagattcatcgtcgcgtgatattggcaaaaacggatatggatgaggccaacgaagcaggtctattcgacactattattattgaagatgatgtgaatttagcatatagtaagttaattcagatactacaggaccgtattagaatgtattttaacactaattaaagacttaagacttaaaacttgataattaataatataactcgtttttatatgtggctatttcaacgtctaatgtattagttaaatattaaaacttaccacgtaaaacttaaaatttaaaatgatatttcattgacagatagatcacacattatgaactttcaaggacttgtgttaactgacaattgcaaaaatcaatgggtcgttggaccattaataggaaaaggtggatttggtagtatttatactactaatgacaataattatgtagtaaaaatagagcccaaagctaacggatcattatttaccgaacaggcattttatactagagtacttaaaccatccgttatcgaagaatggaaaaaatctcacaatataaagcacgtaggtcttatcacgtgcaaggcatttggtctatacaaatccattaatgtggaatatagattcttggtaattaatagattaggtgtagatctagatgcggtgatcagagccaataataatagattaccaaaaaggtcggtgatgttgatcggaatcgaaatcttaaataccatacaatttatgcacgagcaaggatattctcacggagatattaaagcgagtaatatagtcttggatcaaatagataagaataaattatatctagtggattacggattggtttctaaattcatgtctaatggcgaacatgttccatttataagaaatccaaataaaatggataacggtactctagaatttacacctatagattcgcataaaggatacgttgtatctagacgtggagatctagaaacacttggatattgtatgattagatggttgggaggtatcttgccatggactaagatatctgaaacaaagaattgtgcattagtaagtgccacaaaacagaaatatgttaacaatactgcgactttgttaatgaccagtttgcaatatgcacctagagaattgctgcaatatattaccatggtaaactctttgacatattttgaggaacccaattacgacgagtttcggcacatattaatgcagggtgtatattattaagtgtggtgtttggtcgatgtaaaatttttgtcgataaaaattaaaaaataacttaatttattattgatctcgtgtgtacaaccgaaatcatggcgatgttttacgcacacgctctcggtgggtacgacgagaatcttcatgcctttcctggaatatcatcgactgttgccaatgatgtcaggaaatattctgttgtgtcagtttataataacaagtatgacattgtaaaagacaaatatatgtggtgttacagtcaggtgaacaagagatatattggagcactgctgcctatgtttgagtgcaatgaatatctacaaattggagatccgatccatgatcaagaaggaaatcaaatctctatcatcacatatcgccacaaaaactactatgctctaagcggaatcgggtacgagagtctagacttgtgtttggaaggagtagggattcatcatcacgtacttgaaacaggaaacgctgtatatggaaaagttcaacatgattattctactatcaaagagaaggccaaagaaatgagtacacttagtccaggacctataattgattaccacgtctggataggagattgtatctgtcaagttactgctgtggacgtacatggaaaggaaattatgagaatgagattcaaaaagggtgcggtgcttccgatcccaaatctggtaaaagttaaacttggggagaatgatacagaaaatctttcttctactatatcggcggcaccatcgaggtaaccacctctctggaagacagcgtgaataatgtactcatgaaacgtttggaaactatacgccatatgtggtctgttgtatatgatcattttgatattgtgaatggtaaagaatgctgttatgtgcatacgcattcatctaatcaaaatcctataccgagtactgtaaaaacaaatttgtacatgaagactatgggatcatgcattcaaatggattccatggaagctctagagtatcttagcgaactgaaggaatcaggtggatggagtcccagaccagaaatgcaggaatttgaatatccagatggagtggaagacactgaatcaattgagagattggtagaggagttcttcaatagatcagaacttcaggctggtaaattagtcaaatttggtaattctattaattgttaaacatacatctgtttcagctaagcaactaagaacacgtatacggcagcagcttcctttatactctcatcttttaccaacacaaagggtggatatttgttcattggagttgataataatacacacaaagtatttggattcacggtgggttacgactacctcagactggtagagaatgatatagaaaagcatatcaaaagactttgtgttgtgcatttctgtgagaagaaagaggacatcaagtacgcgtgtcgattcatcaaggtatataaacctggggatgaggctacctcgacatacgtgtgcgctatcaaagtggaaagatgctgttgtgctgtgtttgcagattggccagaatcatggtatatggatactaatggtatcaagaagtattctccagatgaatgggtgtcacatataaaattttaattaatgtaactatagagaacaaataataggttgtaatatcatatagacaataactaacaattaattagtaactgttatctcttttttaactaaccaactaactatatacctattaatacatcgtaattatagttcttaacatctattaatcattgattcgcttctttaattttttataaactaacattgttaattgaaaagggataacatgttacagaatataaattatatatggatttttttaaaaaggaaatacttgactggagtgtatatttatctcttcattatatagcacgcgtgtgttccaattcttccacatcccatataatacaggattataatctcattcgaacatacgagaaagtggataaaacaatagttgattttttatctaggttgccaaatttattccatattttagaatatggggaaaatattctacatatttattctatggatgatgctaatacgaatattataattttttttctagatagagtattaaatattaataagaacgggtcatttatacacaatctcaggttatcatcatccattaatataaaagaatatgtatatcaattagttaataatgatcatccagataataggataagactaatgcttgaaaatggacgtagaacaagacattttttgtcctatatatcagatacagttaatatctatatatgtattttaataaatcatggattttatatagatgccgaagacagttacggttgtacattattacatagatgtatatatcactataagaaatcagaatcagaatcatacaatgaattaattaagatattgttaaataatggatcagatgtagataaaaaagatacgtacggaaacacaccttttatcctattatgtaaacacgatatcaacaacgtggaattgtttgagatatgtttagagaatgctaatatagactctgtagactttaatagatatacacctcttcattatgtctcatgtcgtaataaatatgattttgtaaagttattaatttctaaaggagcaaatgttaatgcgcgtaataaattcggaactactccattttattgtggaattatacacggtatctcgcttataaaactatatttggaatcagacacagagttagaaatagataatgaacatatagttcgtcatttaataatttttgatgctgttgaatctttagattatctattatccagaggagttattgatattaactatcgtactatatacaacgaaacatctatttacgacgctgtcagttataatgcgtataatacgttggtctatctattaaacagaaatggtgattttgagacgattactactagtggatgtacatgtatttcggaagcagtcgcaaacaacaacaaaataataatggaagtactattgtctaaacgaccatctttgaaaattatgatacagtctatgatagcaattactaaaaataaacaacataatgcagatttattgaaaatgtgtataaaatatactgcgtgtatgaccgattatgatactcttatagatgtacagtcgctacagcaatataaatggtatattttaaaatgtttcgatgaaatagatatcatgaagagatgttatataaaaaataaaactgtattccaattagttttttgtatcaaagacattaatactttaatgagatacggtaaacatccttctttcgtgaagtgcactagtctcgacgtatacggaagtcgtgtacgtaatatcatagcatctattagatatcgtcagagattaattagtctattatccaagaagctggatgcgggagataaatggtcgtgttttcctaacgaaataaaatataaaatattggaaaactttaacgataacgaactgtccacatatctaaaaatcttataaacactattaaaatataaaatctaagtaggataaaatcacactacatcattgtttccttttagtgctcgacagtgtatactatttttaacactcataaataaaaatgaaaacgatttccgttgttacgttgttatgcgtactacctgctgttgtttattcaacatgtactgtacccactatgaataacgctaaattaacgtctaccgaaacatcgtttaataataaccagaaagttacgtttacatgtgatcagggatatcattcttcggatccaaatgctgtctgcgaaacagataaatggaaatacgaaaatccatgcaaaaaaatgtgcacagtttctgattacatctctgaactatataataaaccgctatacgaagtgaattccaccatgacactaagttgcaacggcgaaacaaaatattttcgttgcgaagaaaaaaatggaaatacttcttggaatgatactgttacgtgtcctaatgcggaatgtcaacctcttcaattagaacacggatcgtgtcaaccagttaaagaaaaatactcatttggggaatatatgactatcaactgtgatgttggatatgaggttattggtgcttcgtacataagttgtacagctaattcttggaatgttattccatcatgtcaacaaaaatgtgatataccgtctctatctaatggattaatttccggatctacattttctatcggtggcgttatacatcttagttgtaaaagtggttttatactaacgggatctccatcatccacatgtatcgacggtaaatggaatcccgtactcccaatatgtgtacgaactaacgaagaatttgatccagtggatgatggtcccgacgatgagacagatttgagcaaactctcgaaagacgttgtacaatatgaacaagaaatagaatcgttagaagcaacttatcatataatcatagtggcgttaacaattatgggcgtcatatttttaatctccgttatagtattagtttgttcctgtgacaaaaataatgaccaatataagttccataaattgctaccgtaaatataaatccgttaaaataattaataattaataattaataattaataacgaacaagtatcaaaagattaaagacttatagctagaatcaattgagatgtcttcttcagtggatgttgatatctacgatgccgttagagcatttttactcaggcactattataacaagagatttattgtgtatggaagaagtaacgccatattacataatatatacaggctatttacaagatgcgccgttataccgttcgatgatatagtacgtactatgccaaatgaatcacgtgttaaacaatgggtgatggatacacttaatggtataatgatgaatgaacgcgatgtttctgtaagcgttggcaccggaatactattcatggaaatgtttttcgattacaataaaaatagtatcaacaatcaactaatgtatgatataattaatagcgtatctataattctagctaatgagagatatagaagcgcttttaacgacgatggtatatacatccgtagaaatatgattaacaagttgtacggatacgcatctctaactactattggcacgatcgctggaggtgtttgttattatctgttgatgcatctagttagtttgtataaataattatttcaatatactagttaaaattttaagattttaaatgtataaaaaactaataacgtttttatttgtaataggtgcattagcatcctattcgaataatgagtacactccgtttaataaactgagtgtaaaactctatatagatggagtagataatatagaaaattcatatactgatgataataatgaattggtgttaaattttaaagagtacacaatttctattattacagagtcatgcgacgtcggatttgattccatagatatagatgttataaacgactataaaattattgatatgtataccattgactcgtctactattcaacgcagaggtcacacgtgtagaatatctaccaaattatcatgccattatgataagtacccttatattcacaaatatgatggtgatgagcgacaatattctattactgcagagggaaaatgctataaaggaataaaatatgaaataagtatgatcaacgatgatactctattgagaaaacatactcttaaaattggatctacttatatatttgatcgtcatggacatagtaatacatattattcaaaatatgatttttaaaaatttaaaatatattatcacttcagtgacagtagtcaaataacaaacaacaccatgagatatattataattctcgcagttttgttcattaatagtatacacgctaaaataactagttataagtttgaatccgtcaattttgattccaaaattgaatggactggggatggtctatacaatatatcccttaaaaattatggcatcaagacgtggcaaacaatgtatacaaatgtaccagaaggaacatacgacatatccgcatttccaaagaatgatttcgtatctttctgggttaaatttgaacaaggcgattataaagtggaagagtattgtacgggactatgcgtcgaagtaaaaattggaccaccgactgtaacattgactgaatacgacgaccatatcaatttgtacatcgagcatccgtatgctactagaggtagcaaaaagattcctatttacaaacgcggtgacatgtgtgatatctacttgttgtatacggctaacttcacattcggagattctgaagaaccagtaacatatgatatcgatgactacgattgcacgtctacaggttgcagcatagactttgccacaacagaaaaagtgtgcgtgacagcacagggagccacagaagggtttctcgaaaaaattactccatggagttcggaagtatgtctgacacctaaaaagaatgtatatacatgtgcaattagatccaaagaagatgttcccaatttcaaggacaaaatggccagagttatcaagagaaaatttaataaacagtctcaatcttatttaactaaatttctcggtagcacatcaaatgatgttaccacttttcttagcatgcttaacttgactaaatattcataactaatttttattaatgatacaaaaacgaaataaaactgcatattatacactggttaacgcccttataggctctaaccattttcaagatgaggtccctgattatagtccttctgttcccctctatcatctactccatgtctattagacgatgtgagaagactgaagaggaaacatggggattgaaaatagggttgtgtataattgccaaagatttctatcccgaaagaactgattgcagtgttcatctcccaactgcaagtgaaggattgataactgaaggcaatggattcagggatatacgaaacaccgataaattataaaaaaagcaatgtgtccgctgtttccgttaataatactattttcgtaactggcggattattcataaataactctaatagcacgatcgtggttaacaatatggaaaaacttgacatttataaagacaaacaatggtcgattatagaaatgcctatggctagggtatatcacggcatcgactcgacatttggaatgttatattttgccggaggtctatccgttaccgaacaatatggtaatttagagaaaaacaacgagatatcttgttacaatcctagaacgaataagtggtttgatatttcatatactatttataagatatccatatcatcattgtgtaaactaaataacgtcttctatgtatttagtaaggacattggatatgtggaaaagtatgatggtgcatggaagttagtacatgatcgtctccccgctataaaggcattatcaacttctccttattgattgaaaatgaaaatataaatagtttttatgtatagcagtattaccctatagttttattgcttactactaacatggatacagatacagatacagatacagatacagatacagatacagatacagatacagatgttacaaatgtagaagatatcataaatgaaatagatagagagaaagaagaaatactaaaaaatgtagaaattgaaaataataaaaacattaacaagaatcatccaagtggatatattagagaagcactcgttattaatacaagtagtaatagtgattccattgataaagaagttatagaatgtatcagtcacgatgtaggaatatagatcatatctactaatttttataatcaatacaaaacataaaaaacaactcgttattacatagcaggcatggaatccttcaagtattgttttgataacgatggcaagaaatggattatcggaaatactttatattctggtaattcaatactctataaggtcagaaaaaatttcactagttcgttctacaattacgtaatgaagatagatcacaaatcacacaagccattgttgtctgaaatacgattctatatatctgtattggatcctttgactatcgacaactggacacgggaacgtggtataaagtatttggctattccagatctgtatggaattggagaaaccgatgattatatgttcttcgttataaagaatttgggaagagtattcgccccaaaggatactgaatcagtcttcgaagcatgtgtcactatgataaacacgttagagtttatacactctcgaggatttacccatggaaaaatagaaccgaggaatatactgattagaaataaacgtctttcactaattgactattctagaactaacaaactatacaagagtggaaactcacatatagattacaacgaggacatgataacttcaggaaatatcaattatatgtgtgtagacaatcatcttggagcaacagtttcaagacgaggagatttagaaatgttgggatattgcatgatagaatggttcggtggcaaacttccatggaaaaacgaaagtagtataaaagtaataaaacaaaaaaaagaatataaaaaatttatagctactttctttgaggactgttttcctgaaggaaatgaacctctggaattagttagatatatagaattagtatacacgttagattattctcaaactcctaattatgacagactacgtagactgtttatacaagattgaaattatattctttttttatagagtgtggtagtgttacggatatctaatattaatattagactatctctatcgcgctacacgaccaatatcgattactatgaatatcttctatgaaaggagagaatgtattcatttctccagcgtcaatctcgtcagtattgacaatactgtattatggagctaatggatccactgctgaacagctatcaaaatatgtagaaacggaggagaacacggataaggttagcgctcagaatatctcattcaaatccataaataaagtatatgggcgatattctgccgtgtttaaagatttctttttgggaaaaattggcgataagtttcaaactgttgacttcactgattgtcgcactatagatgcaatcaacaagtgtgtagatatctttactgaggggaaaatcaatccactattggatgaaccattgtctcctagcaattagtgccgtatactttaaagcaaaatggttgacgccattcgaaaaggaatttaccagtgattatcccttttacgtatcaccaacggaaatggtagatgtaagtatgatgtctatgtacggcgagctatttaatcacgcatctgtaaaggaatcattcggcaacttttcaatcatagaactgccatatgttggagatactagtatgatggtcattcttccagacaagattgatggattagaatccatagaacaaaatctaacagatacaaattttaagaaatggtgtaactctctggatgctatgtttatagatgttcacattcccaagtttaaggtaacaggctcgtataatctggtggatactctagtaaagtcaggactgacagaggtgttcggttcaactggagattatagcaatatgtgtaatttagatgtgagtgtcgacgctatgatccacaaaacgtatatagatgtcaatgaagagtatacagaagcagctgcagcaacttgtgcactggtgtcagactgtgcatcaacaattacaaatgagttctgtgtagatcatccgttcatctatgtgattaggcatgttgatggaaaaattcttttcgttggtagatattgctctccaacaactaattgttaaccattttttttaaaaaaaatagaaaaaacatgtggtattagtgcaggtcgttgttcttccaattgcaattggtaagatgacagccaactttagtacccacgtcttttcaccacagcactgtggatgtgacagactgaccagtattgatgacgtcaaacaatgtttgactgaatatatttattggtcgtcctatgcataccgcaacaggcaatgcgctggacagttgtattccacactcctctcttttagagatgatgcggaattagtgttcatcgacattcgcgagctggtaaaaaatatgccgtgggatgatgtcaaagattgtacagaaatcatccgttgttatataccggatgagcaaaaaaccatcagagagatttcggccatcatcggactttgtgcatatgctgctacttactggggaggtgaagaccatcccactagtaacagtctgaacgcattgtttgtgatgcttgagatgctcaattacgtggattataacatcatattccggcgtatgaattgatgagttgtacatcttgacattttcttctttcttctcttctccctttcccagaaacaaacttttttacccactataaaataaaatgagtatactacctgttatatttcttcctatatttttttattcttcattcgttcagacttttaacgcgtctgaatgtatcgacaaagggtaatattttgcatcattcatggagttagaaaacgagccagtaatcttaccatgtcctcaaataaatacgctatcatccggatataatatattagatattttatgggaaaaacgaggagcggataatgatagaattataccgatagataatggtagcaatatgctaattctgaacccgacacaatcagactctggtatttatatatgcattaccacgaacgaaacctactgtgacatgatgtcgttaaatttgacaatcgtgtctgtctcagaatcaaatatagattttatctcgtatccacaaatagtaaatgagagatctactggcgaaatggtatgtcccaatattaatgcatttattgctagtaacgtaaacgcagatattatatggagcggacatcgacgccttagaaataagagacttaaacaacggacacctggaattattaccatagaagatgttagaaaaaatgatgctggttattatacatgtgttttagaatatatatacggtggcaaaacatataacgtaaccagaattgtaaaattagaggtacgggataaaataatacatcctactatgcaattaccagaaggtgttgtaacttcaataggtagtaatttgactattgcgtgtagagtatcgttgagacctcccacaacggatgcagacgtcttttggataagtaatggtatgtattacgaagaagatgatggggacggagacggtagaataagtgtagcaaataaaatctatatgaccgataagagacgtgttattacatcccggttaaacattaatcctgtcaaggaagaagatgctacaacgtttacgtgtatggcgtttactattcctagcatcagcaaaacagttactgttagtataacgtgaatgtatgttgttacatttccatgtcaattgagtttataagaatttttatacattatcttccaacaagcaattgacgaacgtattgctatgattaactcccacgatactatgcatattattaatcattaacttgcagactatacctagagctattttgacatactcgtgttcttgtgtaattgcagtatctatattattaaagtacgtaaatctagctatagttttattatttaattttagataatataccgtctccttatttttaaaaattgccacatcctttattaaatcatgaatgggaatttctatgtcatcgttagtatattgtgaacaacaagagcagatatctataggaaagggtggaatgcgatacattgatctatgtagttttaaaacacacgcaaactttgaagaatttatataaatcattccatcgatacatccttctatgttgacatgtatatatccaggaattcttttattaatgtcaggaaatgtataaactaaaacattgcccggaagcggagcttctaccggagttatatccgttcttaacttacaaaatgtaaccaatacctttgcatgacttgttttgttcggcaacgttagtttaaacttgacgaatggattaattacaatagcatgatccgcgcatctattaagtttttttactttaacgcccttgtatgtttttacagagactttatctaaatttctagtacttgtatgtgttataaatataacgggatatagaaccgaatcacctaccttagatacccaattacattttatcagatccagataataaacaaattttgtcgccctaactaattctatattgttatatattttacaattggttatgatatcatgtaataacttggaatctaacgcacatcgtcgtacgtttacacaattgtgatttagtgtagtatatctacacatgtatttttccgcgctatagtattctggactagtgataaaactatcgttatatctgtcttcaatgaactcatcgagatattgctctctgtcatattcatacacctgcataaactttctagacatcttacaatccgtgttattttaggatcatatttacatatttactggtataaagatgttagattagttaatgggaatcgtctataataatgaatattaaacaattatatgaggacttttaccacaaagcatcataaaaatgagtcgtcgtctgatttatgttttaaatatcaaccgcaaatcaactcataaaatacaagagaatgaaatatatacatattttagtcattgcaatatagaccatacttctacagaacttgattttgtagttaaaaactatgatctaaacagacgacaacatgtaactgggtatactgcactacactgctatttgtataataattactttacaaacgatgtactgaagatattattaaatcatgacgtaaatgtaacgatgaaaaccagtagcggacgtatgcctgtttatatattgcttactagatgttgtaatatttcacatgatgtagtgatagatatgatagacaaagataaaaaccacttatcgcatagagactattccaacctactactagagtatataaaatctcgttacatgttattgaaggaagaggatatcgatgagaacatagtatcaactttattagataagggaatcgatcctaactttaaacaagacggatatacagcgttacattattattatttgtgtctcgcacacgtttataaaccaggtgagtgtagaaaaccgataacgataaaaaaggccaagcgaattatttctttgtttatacaacatggagctaatctaaacgcgttagataattgtggtaatacaccattccatttgtatcttagtattgaaatgtgtaataatattcatatgactaaaatgctgttgacttttaatccgaatttcaaaatatgtaataatcatggattaacgcctatactatgttatataacttccgactacatacaacacgatattcttgttatgttaatacatcactatgaaacaaatgttggagaaatgccgatagatgagcgtcgtatgatcgtattcgagtttatcaaaacatattctacacgtcctgcagattcgataacttatttgatgaataggtttaaaaatataaatatttatacccgctatgaaggaaagacattattacacgtagcatgtgaatataataatacacaagtaatagattatcttatacgtatcaacggagatataaatgcgttaaccgacaataacaaacacgctacacaactcattatagataacaaagaaaattccccatataccattaattgtttactgtatatacttagatatattgtagataagaatgtgataagatcgttggtggatcaacttccatctctacctatcttcgatataaaatcatttgagaaattcatatcctactgtatacttttagatgacacattttacgataggcacgttaagaatcgcgattctaaaacgtatcgatacgcattttcaaaatacatgtcgttcgataaatacgatggtataataactaaatgtcacgacgaaacaatgttactcaaactgtccactgttctagacactacactatatgcagttttaagatgtcataattcgagaaagttaagaagatacctcaccgagttaaaaaaatataataacgataagtcctttaaaatatattctaatattatgaatgagagataccttaatgtatattataaagatatgtacgtgtcaaaggtatatgataaactatttcctgttttcacagataaaaattgtctactaacattactaccttcagaaattatatacgaaatattatacatgctgacaattaacgatctttataatatatcgtatccacctaccaaagtatagttgtatttttctcatgcgatgtgtgtaaaaaaactgatattatataaatattttagtgccgtataataaagatgacgatgaaaatgatggtacatatatatttcgtatcattatcattattgttattgctattccacagttacgccatagacatcgaaaatgaaatcacagaattcttcaataaaatgagagatactctaccagctaaagactctaaatggttgaatccagcatgtatgttcggaggcacaatgaatgatatggccactctaggagagccattcagtgcaaagtgtcctcctattgaagacagtcttttatcgcacagatataaagactatgtggttaaatgggagaggctagaaaagaatagacggcgacaggtttctaataaacgtgttaaacatggtgatttatggatagccaactatacatctaaattcagtaaccgtaggtatttgtgcaccgtaactacaaagaatggtgactgtgttcagggtatagttagatctcatattaaaaaacctccttcatgcattccaaaaacatatgaactaggtactcatgataagtatggcatagacttatactgtggaattctttacgcaaaacattataataatataacttggtataaagataataaggaaattaatatcgacgacattaagtattcacaaacgggaaaggaattaattattcataatccagagttagaagatagcggaagatacgactgttacgttcattacgacgacgttagaatcaagaatgatatcgtagtatcaagatgtaaaatacttacggttataccgtcacaagaccacaggtttaaactaatactagatccgaaaatcaacgtaacgataggagaacctgccaatataacatgcactgctgtgtcaacgtcattattgattgacgatgtactgattgaatgggaaaatccatccggatggcttataggattcgattttgatgtatactctgttttaactagtagaggcggtatcaccgaggcgaccttgtactttgaaaatgttactgaagaatatataggtaatacatataaatgtcgtggacacaactattattttgaaaaaacccttacaactacagtagtattggagtaaatatacaatgcatttttatatacattactgaattattattactgaattattattactgaattattattaattatatcgtatttgtgctatagaatggatgaagatacgcgactatctaggtatttgtatctcaccgatagagaacatataaatgtagactctattaaacagttgtgtaaaatatcagatcctaatgcatgttatagatgtggatgtacggctttacatgagtacttttataattatagatcagtcaacggaaaatacaagtatagatacaacggttactatcaatattattcatctagcgattatgaaaattataatgaatattattatgatgattatgatagaactggtatgaacagcgagagcgatagtgagagtgataatatatcaatcaaaacagaatatgagaatgaatatgaattctatgatgaaacacaagatcaaagtacacaacacaatgacttataaaaatactaaaactggagagactgattacacgtacctctctaatgggggttgcctgcatactatcgtaatggggtcgatggttgattattgattagtatattccttattcacacaaaaagaacatttttataaacatgaaaccactgtctaaatgtaattatgatcttgatttatagatgaagatcagcctttagaggattttaaccagtatgtttaatatgaaaaaaataaacataacatattttgagattaagcgctattgtgcttaattattttgctctataaactgaatatatagccacaattattgacgggcttgtttatgaccggcaatcatgaatttacagaaattatctctggctatatatcttactgcgacatgttcgtggtgttatgaaacatgcataagaaaaactgcgttgtatcatgacattcaattggagcatgtagaagacaataaagatagtgtagcgtcgctaccgtacaagtagtcaatcaaagagaacgtagtagattgttggctacatttaattggacagatatagctgagggtgttagaaatgagttcattaaaatatgtgatatcaacggaacatatttatataattatactattgctgttagtataattattgattccacggaagaactaccaacagttactccaattacaacaacatatgaaccttctacatataattatactatcgatgatagcactgttattactactgaagaactacaagtgactcctcatatggatctccatcgatgatacatgtattaaaatactttccgaataagtcttttaaatattgtattaattatgaaaaactatgctatgcgagtatgatgcaaagatgtttaatgatacgatactagattttatctctagcgagagatgtcgttagaatcatttatcataactacgtttaataataattcatcaacgaatatcgataacatgtgtcatttatacgttaaagtctgtccgtcttctctattgtttagactgtttgtagaatgctgtgatataaacaaactagtagaaggtacgactccgttacactgttatctaatgaatgaaggatttgaatcatctgttttaaaaaacctattaaaggagtatgtcatgaatacgtttaatgttcatgacatccattacacaaatatttaactcatgatgaagttgagaatgatatgctttctgatagtatagatagctttagctaatataaaaatatattaatccactatatattctagacttgatttaaaaccgataaactactactacgtactgtataagttgttaaaaaaaggagcagaccctaattatgtagatgatagaggtaatacttttcttcattacttctgcatctatatgtccacttatgagaaaacgtcattcaataagatgcatcgtgaaaagaaatttattaaagagttggtaaaatatgaaaccgaaagtaaataatataggaaatacacctctacataactacgtatctcaatatgatatcactctcattcctcatccacaacccattaaaaaaatggaaattaaagccctctattagcataaacggctacaggtctacctttacaatggcctttccttgtgcccagttcagaccctgtcattgccacgctactaaggactccctgaataccgtggccgacgtcagacattgtctgactgaatacatcctgtgggtttctcatagatggacccatagagaaagcgcagggtctctctacaggcttctcatctctttcagaactgatgcaacggagctctttggtggtgagttgaaggattcacttccgtgggacaatatcgacaattgcgtggagatcattaaatgtttcatcagaaatgactccatgaaaaccgccgaagaacttcgtgcaatcattggactttgtactcaatcagctatcgtctctggaagagtcttcaacgataagtatatcgacatactacttatgctgcgaaagattctgaacgagaacgactatctcaccctcttggatcatatccgcactgctaaatactaaatctccttcatgctctctcactacactttttatcatcttatgaggaatgattgccttcatcatttttcgtgaaataggaataattagcaccagaatagctatggattattgtggtagagagtgcactattctatgtcgtctactggatgaagatgtgacgtacaaaaaaataaaactagagattgaaacgtgtcacaacttatcaaaacatatagatagacgaggaaacaatgcgctacattgttacgtctccaataaatgcgatacagacattaagattgttcgactgttactctctcgcggagtcgagagactttgtagaaacaacgaaggattaactccgctaggagcatacagtaagcatagatacgtaaaatctcagattgtgcatctactgatatccagctattcgaattcctctaacgaactcaagtcgaatataaatgatttcgatctgtcttcggataatatcgacttacgtctgctaaaatacctaattgtggataaacggatacgtccgtccaagaatacgaattatgcaatcaatggtctcggattggtggatatatacgtaacgacgcctaatccgagaccagaagtattgctatggcttcttaaatcagaatgttacagcaccggttacgtatttcgtacctgtatgtacaacagtgatatgtgtaagaactctcttcattactatatatcgtctcatagagaatctcaatctctatccaaggatgtaattaaatgtttgatcaataacaatgtttccatccatggcagagacgaaggaggatctttacccatccaatactactggtctttctcaaccatagatatagagattgttaaattattattaataaaggatgtggacacgtgtagagtatacgacgtcagccctatattagaggcgtattatctaaacaagcgatttagagtaaccccatataatgtagacatggaaatcgttaatcttcttattgagagacgtcatactcttgtcgacgtaatgcgtagtattacttcgtacgattccagagaatataaccactacatcatcgataacattctaaagagatttagacaacaggatgaatccatcgtacaagccatgttgataaactacttacattacggcgatatggtcgttcgatgcatgttagataacggacaacaactatcctctgcacgactactttgttaataataatctcgtcgatgtaaacgtcgtaaggtttatcgtggaaaatatggacacgcggctgtaaatcacatatctaacaatggccgtctatgtatgtacggtctgatattatcgagatttaataattgcgggtatcactgttatgaaaccatactaatagatgtatttgatatactaagcaagtacatggatgatatagatatgatcgataatgagaataaaactctactatattacgcggtcgatgtcaataatatacaatttgcaaagcggttattggaatatggagcgagtgttacaacatcacgctcgataatcaatacggccatccagaaaagcagttaccaaagagaaaacaaaacgaggatagttgatttattacttagctaccatcccactctagagactatgattgacgcatttaatagagatatacgctatctatatcctgaaccattattcgcctgtatcagatacgccttaatcctagatgatgattttccttctaaagtaagtatgatatcgccggtcatcataaggaactaaagcgctatagagtagacattaatagaatgaagaatgcctacatatcaggcgtctccatgtttgatatattatttaaacgaagcaaacgccacagactgagatacgcaaagaatccgacatcaaatggtacaaaaaagaactaacgtccatcattacagaaactgtaaagaacagtgagaggatcgactccatagtggacaacattaatacagacgataacttgatttcgaaattacccatggagatactttattactccattaaataatttatcatggagtgataatgtcctgtttcatttgtttccatgacatattacaaaatcgattccgtccaagatgataaaaacatttaccggcatcataaacacggagtttattttatatgtctcgcataaacattactaaaaaaatatattgttctgtttttctttttctttttctttttctttcgtacatctctaattatgaaaaagtaaatgatgaaatgtatgagatgggcgagatggacgagattgtgagcatcgttcgcgacagtatgtggtacatacctaacgtatttatggacgacggtaagaatgaaggtcacgtttctgtcaacaatgtttgtcatatgtattttacgttctttgatgtggatacatcgtctcatctgtttaagctagttattaaacactgcgatctgaataaacgaggtaactctccattacattgctatacgatgaatacacgatttaatccatctgtattaaagatattgttacaccacggcatgcgtaactttgatagcaaggatgaaaaaggacaccactatctgattcattcactatcaatcgataacaagatctttgatatactaacggacaccattgatgactttagtaaatcatccgatctattgctgtgttatcttagatataaattcaatgggagcttaaactactacgttctgtacaaaggatccgaccctaattgcgccgacgaggatgaactcacttctcttcattactactgtaaacacatatccacgttctacaaaagcaattattacaagttaagtcacactaagatgcgagccgagaagcgattcatctacgcgataatagattatggagcaaacattaacgcggttacacacttaccttcaacagtataccaaacatagtcctcgtgtggtgtatgctcttttatctcgaggatacgtaataatcttgattgtacacccatcatggaacgattgtgcaacaggtcatattctcataatgttactcaattggcacgaacaaaaggaagaaggacaacatctactttatctattcataaaacataatcaaggatacactctcaatatactacggtatctactagataggttcgacattcagaaagacgaatacatataccgcctttcaaaattgtaacaacaatgttgcctcatacatcggatacgacatcaaccttccgactaaagacggtattcgacttggtgtttgaaaacagaaacatcatatacaaggcggatgttgtgaatgacatcatccaccacagactgaaagtatctctacctatgattaaatcgttgttctacaagatgtcagaattctctccctacgacgattactacgtaaaaaagatactagcctactgcctattaagggacgagtcattcgcggaactacatagtaaattctgtttaaacgaggactataaaagtgtatttatgaaaaatatatcattcgataagatagattccatcatcgtgacataagtcgcctcaaagagattcgaatctccgacaccgacctgtatacggtatcacagctatcttgaagccatacattcggacagacacatttcatttcccatgtacgacgatctcatagaacagtgccatctatcgatggagcgtaaaagtaaactcgtcgacaaagcactcaataaattagagtctaccatcggtcaatctagactatcgtatttgcctccggaaattatgcgcaatatcatctaaacagtatgttgtacggaaagaaccattacaaatattatccatgatagaaagaaaatatctatatgattggagaagtaggaaacaggaacacgacaacgattactacattattaaattatgaagtccgtattatactcgtatatattgtttctctcatgtataataataaacggaagagatatagcaccgcatgcaccatccgatggaaagtgtaaagacaacgaatacaaacgccataatttgtgtccgggaacatacgcttccagattatgcgatagcaagactaacacacaatgtacgccgtgtggttcgggtaccttcacatctcgcaataatcatttacccgcttgtctaagttgtaacggaagacgcgatcgtgtaacactactcacaatagaatctgtgaatgctctcccggatattattgtcttctcaaaggatcatccggatgcaaggcatgtgtttcccaaacaaaatgtggaataggatacggagtatccggagacgtcatctgttctccgtgtggtctcggaacatattctcacaccgtctcttccgcagataaatgcgaacccgtacccagaaatacctttaactatatcgatgtggaaattaatctgtatcccgtcaacgacacgtcgtgtactcggacgaccactaccggtctcagtgaatccatctcaacgtcggaactaactattactatgaatcataaagactgtaatcccgtatttcgtgatggatacttctccgttcttaataaggtagcgacttcaggattctttacaggagaaaggtgtgcactctgaatttcgagattaaatgcaataacaaagattcttcctccaaacagttaacgaaagcaaagaatgatgacggtatcatgccgcattcggagactgtatatctagcgtcgacatctatatactatatagtaataccaatactcaagactacgaaactgatacaatctcttatcatgtgggtaatgttctcgatgtcgatagccatatgcccggtagttgcgatatacataaactgatcactaattccaaacccacccgctttttatagtaagtttttcacccataaataataaatacaataattaatttctcgtaaaagtagaaaatatattctaatttattgcatggtaaggaagtagaatcataaagaacagtactcaatcaatagcaattatgaaacaatatatcgtcctggcatgcatgtgcctgccagtcttcagcaatcatcctcatcctcctcctcgtgtacggaagaagaaaacaaacatcatatgggaatcgatgttattatcaaagtcacaaagcaagaccaaacaccgaccaatgataagatttgccaatccgtaacggaaattacagagtccgagtcagatccagatcccgaggtggaatcagaagatgattccacatcagtcgaggatgtagatcctcctaccacttattactccatcatcggtggaggtctgagaatgaactttggattcaccaaatgtcctcagattaaatccatctcagaatccgctgatggaaacacagtgaatgctagattgtccagcgtgtccccaggacaaggtaaggactctcccgcgatcactcgtgaagaagctctggctatgatcaaagactgtgaggtgtctatcgacatcagatgtagcgaagaagagaaagacagcgacatcaagacccatccagtactcgggtctaacatctctcataagaaagtgagttacgaagatatcatcggttcaacgatcgtcgatacaaaatgtgtcaagaatctagagtttagcgttcgtatcggagacatgtgcaaggaatcatctgaacttgaggtcaaggatggattcaagtatgtcgacggatcggcatctgaaggtgcaaccgatgatacttcactcatcgattcaacaaaactcaaagcgtgtgtctgaatcgataactctattcatctgaaattggatgagtagggttaatcgaacgattcaggcacaccacgaattaaaaaagtgtaccggacactatattccggtttgcaaaacaaaaatgttcttaactacattcacaaaaagttacctctcgttacttcttctttttctgtctcaatagtgtgatacgattatgacactattcctattcctattcctatttcctttcagggtatcacaaaaatattaaacctctttctgatggtctcataaaaaaagttttacaaaaatatttttattctctttctctctttgatggtctcataaaaaaagttttacaaaaatatttttattctctttctctctttgatggtctcataaaaaaagttttacaaaaatatttttattctctttctctctttgatggtctcataaaaaaagttttacaaaaatatttttattctctttctctctttgatggtctcataaaaaaagttttacaaaaatatttttattctctttctctctttgatggtctcataaaaaaagttttacaaaaatatttttattctctttctctctttgatggtctcataaaaaaagttttacaaaaatatttttattctctttctctcttcgatggtctcacaaaaaaagttttacaaaaatatttttattctctttctctctttgatggtctcataaaaaaagttttacaaaaatatttttattctctttctctctttgatggtctcataaaaaatattaaacctctttctgatggtgtcactaaaatatttttattctcattctcattttctctttctctcttcaatggagtcataaaatatttttattctctttctctcttcgatggtctcacaaaaatattaaacctctttctgatggtgtcactaaaatatttttattctcattctcattttctctttctctcttcaatggagtcataaaatatttttattctctttctctcttcgatggtctcacaaaaatattaaacctctttctgatggagtcgtaaaaaagttttatctctttctctcttcgatggtctcactaaaatattttttattctctttctgatgcatcaactatttcttaaacaataacgtccaacaacatatactcgtcgagcttatcaacatcccctatgcccatctaggttaccagacaattgtatatcataaaataatgtttataatttacacgttaaaatcatataataaaacgtagatcgtataatattttttggtatataaatgatctagtaaaatccatgtaggggatactgctcacattttttctttggtacaaaatttcacacaagtttttatacagacaaattcttgtccatatattttaaaacattgacttttgtactaagaaaaatatctagactaactatctctttctctttctctcttcgatggtctcacaaaaatattaaacctctttctgatggagtcgtaaaaaagttttatctctttctctcttcgatggtctcacaaaaatattaaacctctttctgatggagtcgtaaaaaagttttatctctttctctcttcgatggtctcacaaaaatattaaacctctttctgatggagtcgtaaaaaagttttatctttctctcttcgatggtctcacaaaaatattaaacctctttctgatggagtcgtaaaaaagttttatctctttctctcttcgatggtctcacaaaaatattaaacctctttctgatggagtcgtaaaaaagttttatctctttctctcttcgatggtctcacaaaaatattaaacctctttctgatggagtcgtaaaaaagttttatctctttctctcttcgatggtctcacaaaaatattaaacctctttctgatggagtcgtaaaaaagttttatctctttctctcttcgatggtctcacaaaaatattaaacctctttctgatggagtcgtaaaaaagttttatctctttctctcttcgatggtctcacaaaaatattaaacctctttctgatggagtcgtaaaaaagttttatctctttctctcttcgatggtctcacaaaaatattaaacctctttctgatggagtcgtaaaaaagttttatctctttctctcttcgatggtctcacaaaaatattaaacctctttctgatggagtcgtaaaaaagttttatctctttctctcttcgatggtctcacaaaaatattaaacctctttctgatggagtcgtaaaaaagttttatctctttctctcttcgatggtctcacaaaaatattaaacctctttctgatggagtcgtaaaaaagttttatctctttctctcttcgatggtctcacaaaaatattaaacctctttctgatggagtcgtaaaaaagttttatctctttctctcttcgatggtctcacaaaaatattaaacctctttctgatggagtcgtaaaaaagttttatctctttctctcttcgatggtctcacaaaaatattaaacctctttctgatggagtcgtaaaaaagttttatctctttctctcttcgatggtctcacaaaaatattaaacctctttctgatggagtcgtaaaaaagttttatctctttctctcttcgatggtctcacaaaaatattaaacctctttctgatggagtcgtaaaaaagttttatctctttctctcttcgatggtctcacaaaaatattaaacctctttctgatggagtcgtaaaaaagttttatctctttctctcttcgatggtctcacaaaaatattaaacctctttctgatggagtcgtaaaaaagttttatctctttctctcttcgatggtctcacaaaaatattaaacctctttctgatggagtcgtaaaaaagttttatctctttctctcttcgatggtctcacaaaaatattaaacctctttctgatggagtcgtaaaaaagttttatctctttctctcttcgatggtctcacaaaaatattaaacctctttctgatggagtagtcgtaaaaaagttttatctctttctctcttcgatggtctcacaaaaatattaaacctctttctgatggagtcgtaaaaaagttttatctctttctctcttcgatggtctcacaaaaatattaaacctctttctgatggagtcgtaaaaaagttttatctctttctctcttcgatggtctcacaaaaatattaaacctctttctgatggagtcgtaaaaaagttttatctctttctctcttcgatggtctcacaaaaatattaaacctctttctgatggagtcgtaaaaaagttttatctctttctccttcgatggtctcacaaaaatattaaacctctttctgatggagtcgtaaaaaagttttatctctttctccttcgatggtctcacaaaaatattaaacctctttctgatggagtcgtaaaaaagttttatctctttctcctttctcacaaaaatattaaacctctttctgatggagtcgtaaaaaagttttatctctttctcctttctcacaaaaatattaaacctctttctgatggagtctccttcgatggtctcacaaaaatattaaacctctttctgatggagtcgtaaaaaagttttatctctttctccttcgatggtctcacaaaaatattaaacctctttctgatggagtcgtaaaaaagttttatctctttctccttcgatggtctcacaaaaatattaaacctctttctgatggagtcgtaaaaaagttttatctctttctccttcgatggtctcacaaaaatattaaacctctttctgatggagtcgtaaaaaagttttatctctttctcctttctcacaaaaatattaaacctctttctgatggagtcgtaaaaaagttttatctctttctccttcgatggtctcacaaaaatattaaacctctttctgatggagtcgtaaaaaagttttatctctttctccttcgatggtctcacaaaaatattaaacctctttctgatggagtcgtaaaaaagttttatctctttctccttcgatggtctcacaaaaatattaaacctctttctgatggtctctataaagcgattgatttttcttaccctctagagtttcctacggtcgttggtcacacatttttttctagacactaaataaatagtaaaattaaattaattataaaattatgtatatgatttactaactttagttagataagttagtaatacataaattttagtatattaatattatattttaaa

SEQ ID NO: 23 - protein, 193 aa, Homo sapiens
  Erythropoietin
MGVHECPAWLWLLLSLLSLPLGLPVLGAPPRLICDSRVLERYLLEAKEAENITTGCAEHCSLNENITVPDTKVNFYAWKRMEVGQQAVEVWQGLALLSEAVLRGQALLVNSSQPWEPLQLHVDKAVSGLRSLTTLLRALGAQKEAISPPDAASAAPLRTITADTFRKLFRVYSNFLRGKLKLYTGEACRTGDR

SEQ ID NO: 24 - protein, 272 aa, Artificial Sequence
  anti-VEGF single chain GLAF-1
METDTLLLWVLLLWVPGSTGDEVQLVESGGGLVQPGGSLRLSCAASGFTISDYWIHWVRQAPGKGLEWVAGITPAGGYTYYADSVKGRFTISADTSKNTAYLQMNSLRAEDTAVYYCARFVFFLPYAMDYWGQGTLVTVSSGGGGSGGGGSGGGGSDIQMTQSPSSLSASVGDRVTITCRASQDVSTAVAWYQQKPGKAPKLLIYSASFLYSGVPSRFSGSGSGTDFTLTISSLQPEDFATYYCQQGYGNPFTFGQGTKVEIKRDYKDDDDK

SEQ ID NO: 25 - protein, 121 aa, Homo sapiens
  Human plasminogen kringle 5 domain
MYRMQLLSCIALSLALVTNSPVVLLPDVETPSEEDCMFGNGKGYRGKRATTVTGTPCQDWAAQEPHRHSIFTPETNPRAGLEKNYCRNPDGDVGGPWCYTTNPRKLYDYCDVPQCAAPSFD

SEQ ID NO: 26 - protein, 264 aa, Artificial Sequence
  human tissue factor-alphavbeta3-integrin RGD fusion protein
METPAWPRVPRPETAVARTLLLGWVFAQVAGASGTTNTVAAYNLTWKSTNFKTILEWEPKPVNQVYTVQISTKSGDWKSKCFYTTDTECDLTDEIVKDVKQTYLARVFSYPAGNVESTGSAGEPLYENSPEFTPYLETNLGQPTIQSFEQVGTKVNVTVEDERTLVRRNNTFLSLRDVFGKDLIYTLYYWKSSSSGKKTAKTNTNEFLIDVDKGENYCFSVQAVIPSRTVNRKSTDSPVECMGQEKGEFRGRGDSPDYKDDDDK

SEQ ID NO: 27 - protein, 207 aa, Artificial Sequence
  interleukin-24
MNFQQRLQSLWTLASRPFCPPLLATASQMQMVVLPCLGFTLLLWSQVSGAQGQEFHFGPCQVKGVVPQKLWEAFWAVKDTMQAQDNITSARLLQQEVLQNVSDAESCYLVHTLLEFYLKTVFKNYHNRTVEVRTLKSFSTLANNFVLIVSQLQPSQENEMFSIRDSAHRRFLLFRRAFKQLDVEAALTKALGEVDILLTWMQKFYKL

SEQ ID NO: 28 - protein, 520 aa, Artificial Sequence
  SIL-6R/IL-6 fusion protein
MLAVGCALLAALLAAPGAALAPRRCPAQEVARGVLTSLPGDSVTLTCPGVEPEDNATVHWVLRKPAAGSHPSRWAGMGRRLLLRSVQLHDSGNYSCYRAGRPAGTVHLLVDVPPEEPQLSCFRKSPLSNVVCEWGPRSTPSLTTKAVLLVRKFQNSPAEDFQEPCQYSQESQKFSCQLAVPEGDSSFYIVSMCVASSVGSKFSKTQTFQGCGILQPDPPANITVTAVARNPRWLSVTWQDPHSWNSSFYRLRFELRYRAERSKTFTTWMVKDLQHHCVIHDAWSGLRHVVQLRAQEEFGQGEWSEWSPEAMGTPWTESRSPPARGGGGSGGGGSVEPVPPGEDSKDVAAPHRQPLTSSERIDKQIRYILDGISALRKETCNKSNMCESSKEALAENNLNLPKMAEKDGCFQSGFNEETCLVKIITGLLEFEVYLEYLQNRFESSEEQARAVQMSTKVLIQFLQKKAKNLDAITTPDPTTNASLLTKLQAQNQWLQDMTTHLILRSFKEFLQSSLRALRQM

SEQ ID NO: 29 - DNA, 18 bp, Artificial Sequence
  Short non-coding DNA fragment containing SacI and Bam HI sites contained in pCR-TKLR-gpt2
ggtaccgagctcggatcc

SEQ ID NO: 30 - DNA, 4793 bp, Artificial Sequence
  FSE-IL24-1
gacgtctaagaaaccattattatcatgacattaacctataaaaataggcgtatcacgaggccctttcgtctcgcgcgtttcggtgatgacggtgaaaacctctgacacatgcagctcccggagacggtcacagcttgtctgtaagcggatgccgggagcagacaagcccgtcagggcgcgtcagcgggtgttggcgggtgtcggggctggcttaactatgcggcatcagagcagattgtactgagagtgcaccatatgtagaagaattgataaatatgaaaccttttaagaatatgaataaaataacaattaatcaaaaggataattgtatattagcaaatcgatgctttgttaaaatagatactcctagatacataccatcgacatccattagcagttctaatatcatcagaatacggaatcatgattttacattatctgaattattgtattcaccgtttcattttcaacagcctcagtttcaatatctccttcctgggtttgtattaacgtgtattgataaagtttcgaaacagcaaaaagaatgtaaatattgtatctctaatcgtggagatgatgatagtttaagcattaatctatttattccgactattaacaagtctatatatattattatcggtttacggatgaaaaatttttggaagcctaaattcgaaatagaataatgtttttatattatacatgtgctaaaagaatgatcgatacagtttaagtgaaagctagagaggggtttttaaatggtcatcggtttagtcatattcgtgtctgtaagcttggtaccgagctctccagacattgttgaattagatcgataaaaattaattaattacccgggttatcagagcttgtagaatttctgcatccaggtcagaagaatgtccacttccccaagggctttggtcagagctgcttctacgtccaactgtttgaatgctctccggaatagcagaaaccgcctgtgtgcactgtctctgatggaaaacatctcattttcttgactgggttgcagttgtgacacgatgagaacaaagttgttggccagagtagagaatgacttcagagtcctgacttcaactgttctattgtggtagtttttgaaaacagttttcaagtagaactccagcagggtgtggacaaggtaacagctctcagcatccgagacgttctgcagaacctcctgctgcagcagccgggcactcgtgatgttatcctgagcttgcatagtgtctttcacagcccagaaggcttcccacagtttctggggaacaacccccttcacttggcagggcccaaagtggaattcttggccctgggcccctgatacctggctccagagaagcagggtaaaacccaggcaagggagcacaaccatctgcatttgagaggctgtcgccagcaaaggagggcagaagggtctgctggctaaagtccacaggctttgcagcctctgttgaaaattcatggtggtcgacttcgagcaaaaaaagacgctagtttttcaatttttgagctcggatcctgcggccgccatcgtcggtgtgttgtctaacgtattggacatgtttatgtacgtagaagaaaataatgaagaggatgctagaatcaaggaggagcaagaactactgttgctatattaatacataattgaaaatctaccaacttaaatacaccgcctataaatttacaatgaaacacagattgtattctgaaggattgagtattagtaatgatttaaactcgataatcggtcaacaatctacaatggatacggatatagaaatagacgaagatgacatcatggaacttcttaatatattgactgagttaggttgtgatgtcgactttgatgaaaattttagcgatatagccgatgatattctagaatcgttgatagaacaggatgtataagtttttatgttaactaaatgtggccatttgcatcggtacctgcgggagcaaaatgtaggctggtagaaacactaccagaaaatatggattttagatccgatcatttaacaacatttgaatgttttaacgaaattatcactctagctaagaaatatatatacatagcatctttttgttgtaatcctctgaattctagaaaagtagaaaatatattctaatttattgcacgggatgagcgaaaaatacatcgtcacctgggacatgttgcagatccatgcacgtaaactcgcaagccgactgatgccttctgaacaatggaaaggcattattgccgtaagccgtggcggtctggtaccgggtgcgttactggcgcgtgaactgggtattcgtcatgtcgataccgtttgtatttccagctacgatcacgacaaccagcgcgagcttaaagtgctgaaacgcgcagaaggcgatggcgaaggcttcatcgttattgatgacctggtggataccggtggtactgcggttgcgattcgtgaaatgtatccaaaagcgcactttgtcaccatcttcgcaaaaccggctggtcgtccgctggttgatgactatgttgttgatatcccgcaagatacctggattgaacagccgtgggatatgggcgtcgtattcgtcccgccaatctccggtcgctaaggatcagcttggcgtaatcatggtcatagctgtttcctgtgtgaaattgttatccgctcacaattccacacaacatacgagccggaagcataaagtgtaaagcctggggtgcctaatgagtgagctaactcacattaattgcgttgcgctcactgcccgctttccagtcgggaaacctgtcgtgccagctgcattaatgaatcggccaacgcgcggggagaggcggtttgcgtattgggcgctcttccgcttcctcgctcactgactcgctgcgctcggtcgttcggctgcggcgagcggtatcagctcactcaaaggcggtaatacggttatccacagaatcaggggataacgcaggaaagaacatgtgagcaaaaggccagcaaaaggccaggaaccgtaaaaaggccgcgttgctggcgtttttccataggctccgcccccctgacgagcatcacaaaaatcgacgctcaagtcagaggtggcgaaacccgacaggactataaagataccaggcgtttccccctggaagctccctcgtgcgctctcctgttccgaccctgccgcttaccggatacctgtccgcctttctcccttcgggaagcgtggcgctttctcatagctcacgctgtaggtatctcagttcggtgtaggtcgttcgctccaagctgggctgtgtgcacgaaccccccgttcagcccgaccgctgcgccttatccggtaactatcgtcttgagtccaacccggtaagacacgacttatcgccactggcagcagccactggtaacaggattagcagagcgaggtatgtaggcggtgctacagagttcttgaagtggtggcctaactacggctacactagaaggacagtatttggtatctgcgctctgctgaagccagttaccttcggaaaaagagttggtagctcttgatccggcaaacaaaccaccgctggtagcggtggtttttttgtttgcaagcagcagattacgcgcagaaaaaaaggatctcaagaagatcctttgatcttttctacggggtctgacgctcagtggaacgaaaactcacgttaagggattttggtcatgagattatcaaaaaggatcttcacctagatccttttaaattaaaaatgaagttttaaatcaatctaaagtatatatgagtaaacttggtctgacagttaccaatgcttaatcagtgaggcacctatctcagcgatctgtctatttcgttcatccatagttgcctgactccccgtcgtgtagataactacgatacgggagggcttaccatctggccccagtgctgcaatgataccgcgagacccacgctcaccggctccagatttatcagcaataaaccagccagccggaagggccgagcgcagaagtggtcctgcaactttatccgcctccatccagtctattaattgttgccgggaagctagagtaagtagttcgccagttaatagtttgcgcaacgttgttgccattgctacaggcatcgtggtgtcacgctcgtcgtttggtatggcttcattcagctccggttcccaacgatcaaggcgagttacatgatcccccatgttgtgcaaaaaagcggttagctccttcggtcctccgatcgttgtcagaagtaagttggccgcagtgttatcactcatggttatggcagcactgcataattctcttactgtcatgccatccgtaagatgcttttctgtgactggtgagtactcaaccaagtcattctgagaatagtgtatgcggcgaccgagttgctcttgcccggcgtcaatacgggataataccgcgccacatagcagaactttaaaagtgctcatcattggaaaacgttcttcggggcgaaaactctcaaggatcttaccgctgttgagatccagttcgatgtaacccactcgtgcacccaactgatcttcagcatcttttactttcaccagcgtttctgggtgagcaaaaacaggaaggcaaaatgccgcaaaaaagggaataagggcgacacggaaatgttgaatactcatactcttcctttttcaatattattgaagcatttatcagggttattgtctcatgagcggatacatatttgaatgtatttagaaaaataaacaaataggggttccgcgcacatttccccgaaaagtgccacct

SEQ ID NO: 31 - DNA, 6022 bp, Artificial Sequence
  FSE-hNET vector
gacgtctaagaaaccattattatcatgacattaacctataaaaataggcgtatcacgaggccctttcgtctcgcgcgtttcggtgatgacggtgaaaacctctgacacatgcagctcccggagacggtcacagcttgtctgtaagcggatgccgggagcagacaagcccgtcagggcgcgtcagcgggtgttggcgggtgtcggggctggcttaactatgcggcatcagagcagattgtactgagagtgcaccatatgtagaagaattgataaatatgaaaccttttaagaatatgaataaaataacaattaatcaaaaggataattgtatattagcaaatcgatgctttgttaaaatagatactcctagatacataccatcgacatccattagcagttctaatatcatcagaatacggaatcatgattttacattatctgaattattgtattcaccgtttcattttcaacagcctcagtttcaatatctccttcctgggtttgtattaacgtgtattgataaagtttcgaaacagcaaaaagaatgtaaatattgtatctctaatcgtggagatgatgatagtttaagcattaatctatttattccgactattaacaagtctatatatattattatcggtttacggatgaaaaatttttggaagcctaaattcgaaatagaataatgtttttatattatacatgtgctaaaagaatgatcgatacagtttaagtgaaagctagagaggggtttttaaatggtcatcggtttagtcatattcgtgtctgtaagcttggtaccgagctctccagacattgttgaattagatcgataaaaattaattaattacccatctcagatggccagccagtgttgcaactggaactgtctgatgtccctctgagccaccaggtggtgctcgttctctggcgtgatgccataggccagtctctcccaaagagagccctgcgtgctgaggaacttatagatgacgtagatgggcaccaggaccatggaggacagggcgatgccccaccccacccagttggcccagggcgggaagatgtagtcgtcgtaggtgagtggcttgaagttgatgatgctgaccacaaccacgaacaggaggaaggcaggactgacgaacttccagcacagtctccagtatagacccggcctgaaccccatcatctgctggatgtcgttgctgaacctgtccactccataaaaccaggaaactccgatggcttccatgaggacagcaaaaaggatggaggtgcccgcagcaaaggtgtccaggagggtcaagacgtaaattccacccttggttatgcagaacagggcgagaaggaaagtgctgaaggtgacgccaaatgtgaagagtttccggtgtcgcttcaggacctggaagtcatctgccaggcccgtgatgacagcctccatgcctcccattgagctgtcaaggcccagcgccaggagcatgacgaaaaacacaacagcccagaatgtagatccagacagggtagaaatggcctctggatacaggatgaacactaggccagctccttctgtggccacatcctcaatgttgaccttgtgttcatgggccatgtaaccaaggatggagaagatggcgaacccagagacgaagctggtgatacagttgatgctgctggtcagcagggcatccctgtaacagttgttgtcaaatttgttgtaactggcaaatgcaatcaatactccaaatccagcccccaaggaaaaaaatatctgagttgcggcatcaatccataccgtggcctctttcaagcggtagaagtcgatgtgcaggtaggcattgatgccattggaggctccgggcagcgtgacgccatggaccaggagcacgaacagcacgaagtaaggcagcgtggctgtgatccacaccacctttcctgatgtcttcacccctttccagaggctaaaatacaagacgatgacgacgaccatcagacagagcaagagctgccactggggcaggccgatgtcatgaatcccgctgctctcgtgaaggtgcaggacaccacgctcataaaactcggctgccggcgtgaacttgtacttggagtacttggtgtggttgccaagcacggagccattgaggagcttggggtcggtacagttggggctgttccaggtgtggccacagtcggtccagggcaggttgagggtgaaggaggagaagaggtagtagagtgaccaggcgatgatgacgttgtagtagaagccaacgtacagggcgatcaggatgacagcatagccaacgcctttgaagaatgggcagattttccaaacggtggcagccccctcccggttgtactgtcccagagccagctccatgtagaacaggggcatccccgcgatgataaggaacagtgtgtacgggatcaagaaggcaccgccgccgttcttgtagcagaggtaggggaagcgccacacgttggccaggtccactgcgaagccgactacggacagcaggaagtcgatcttcttgccccaggtctcccggggctgcgcgtcgccgtcgcggggcgccagcaggcactggacgccgttgcgctccttcaccaccagcagctccgcagttttgcgcgcccgaaggggctgctctggacccgtgtccgccccgttgttctcgggctgcacctgcgggttcatccgcgccagaagcatggtggcgtcgacttcgagcaaaaaaagacgctagtttttcaatttttgagctcggatcctgcggccgccatcgtcggtgtgttgtctaacgtattggacatgtttatgtacgtagaagaaaataatgaagaggatgctagaatcaaggaggagcaagaactactgttgctatattaatacataattgaaaatctaccaacttaaatacaccgcctataaatttacaatgaaacacagattgtattctgaaggattgagtattagtaatgatttaaactcgataatcggtcaacaatctacaatggatacggatatagaaatagacgaagatgacatcatggaacttcttaatatattgactgagttaggttgtgatgtcgactttgatgaaaattttagcgatatagccgatgatattctagaatcgttgatagaacaggatgtataagtttttatgttaactaaatgtggccatttgcatcggtacctgcgggagcaaaatgtaggctggtagaaacactaccagaaaatatggattttagatccgatcatttaacaacatttgaatgttttaacgaaattatcactctagctaagaaatatatatacatagcatctttttgttgtaatcctctgaattctagaaaagtagaaaatatattctaatttattgcacgggatgagcgaaaaatacatcgtcacctgggacatgttgcagatccatgcacgtaaactcgcaagccgactgatgccttctgaacaatggaaaggcattattgccgtaagccgtggcggtctggtaccgggtgcgttactggcgcgtgaactgggtattcgtcatgtcgataccgtttgtatttccagctacgatcacgacaaccagcgcgagcttaaagtgctgaaacgcgcagaaggcgatggcgaaggcttcatcgttattgatgacctggtggataccggtggtactgcggttgcgattcgtgaaatgtatccaaaagcgcactttgtcaccatcttcgcaaaaccggctggtcgtccgctggttgatgactatgttgttgatatcccgcaagatacctggattgaacagccgtgggatatgggcgtcgtattcgtcccgccaatctccggtcgctaaggatcagcttggcgtaatcatggtcatagctgtttcctgtgtgaaattgttatccgctcacaattccacacaacatacgagccggaagcataaagtgtaaagcctggggtgcctaatgagtgagctaactcacattaattgcgttgcgctcactgcccgctttccagtcgggaaacctgtcgtgccagctgcattaatgaatcggccaacgcgcggggagaggcggtttgcgtattgggcgctcttccgcttcctcgctcactgactcgctgcgctcggtcgttcggctgcggcgagcggtatcagctcactcaaaggcggtaatacggttatccacagaatcaggggataacgcaggaaagaacatgtgagcaaaaggccagcaaaaggccaggaaccgtaaaaaggccgcgttgctggcgtttttccataggctccgcccccctgacgagcatcacaaaaatcgacgctcaagtcagaggtggcgaaacccgacaggactataaagataccaggcgtttccccctggaagctccctcgtgcgctctcctgttccgaccctgccgcttaccggatacctgtccgcctttctcccttcgggaagcgtggcgctttctcatagctcacgctgtaggtatctcagttcggtgtaggtcgttcgctccaagctgggctgtgtgcacgaaccccccgttcagcccgaccgctgcgccttatccggtaactatcgtcttgagtccaacccggtaagacacgacttatcgccactggcagcagccactggtaacaggattagcagagcgaggtatgtaggcggtgctacagagttcttgaagtggtggcctaactacggctacactagaaggacagtatttggtatctgcgctctgctgaagccagttaccttcggaaaaagagttggtagctcttgatccggcaaacaaaccaccgctggtagcggtggtttttttgtttgcaagcagcagattacgcgcagaaaaaaaggatctcaagaagatcctttgatcttttctacggggtctgacgctcagtggaacgaaaactcacgttaagggattttggtcatgagattatcaaaaaggatcttcacctagatccttttaaattaaaaatgaagttttaaatcaatctaaagtatatatgagtaaacttggtctgacagttaccaatgcttaatcagtgaggcacctatctcagcgatctgtctatttcgttcatccatagttgcctgactccccgtcgtgtagataactacgatacgggagggcttaccatctggccccagtgctgcaatgataccgcgagacccacgctcaccggctccagatttatcagcaataaaccagccagccggaagggccgagcgcagaagtggtcctgcaactttatccgcctccatccagtctattaattgttgccgggaagctagagtaagtagttcgccagttaatagtttgcgcaacgttgttgccattgctacaggcatcgtggtgtcacgctcgtcgtttggtatggcttcattcagctccggttcccaacgatcaaggcgagttacatgatcccccatgttgtgcaaaaaagcggttagctccttcggtcctccgatcgttgtcagaagtaagttggccgcagtgttatcactcatggttatggcagcactgcataattctcttactgtcatgccatccgtaagatgcttttctgtgactggtgagtactcaaccaagtcattctgagaatagtgtatgcggcgaccgagttgctcttgcccggcgtcaatacgggataataccgcgccacatagcagaactttaaaagtgctcatcattggaaaacgttcttcggggcgaaaactctcaaggatcttaccgctgttgagatccagttcgatgtaacccactcgtgcacccaactgatcttcagcatcttttactttcaccagcgtttctgggtgagcaaaaacaggaaggcaaaatgccgcaaaaaagggaataagggcgacacggaaatgttgaatactcatactcttcctttttcaatattattgaagcatttatcagggttattgtctcatgagcggatacatatttgaatgtatttagaaaaataaacaaataggggttccgcgcacatttccccgaaaagtgccacct

SEQ ID NO: 32 - DNA, 7398 bp, Artificial Sequence
  TK-SE-hNET3 vector
agcgcccaatacgcaaaccgcctctccccgcgcgttggccgattcattaatgcagctggcacgacaggtttcccgactggaaagcgggcagtgagcgcaacgcaattaatgtgagttagctcactcattaggcaccccaggctttacactttatgcttccggctcgtatgttgtgtggaattgtgagcggataacaatttcacacaggaaacagctatgaccatgattacgccaagctttgttacagatggaagggtcaaacttaataaaggatatttgttcgactttgtgattagtttgatgcgattcaaaaaagaatcctctctagctaccaccgcaatagatcctgttagatacatagatcctcgtcgtgatatcgcattttctaacgtgatggatatattaaagtcgaataaagtgaacaataattaattctttattgtcatcatgaacggcggacatattcagttgataatcggccccatgttttcaggtaaaagtacagaattaattagacgagttagacgttatcaaatagctcaatataaatgcgtgactataaaatattctaacgataatagatacggaacgggactatggacgcatgataagaataattttgaagcattggaagcaactaaactatgtgatgtcttggaatcaattacagatttctccgtgataggtatcgatgaaggacagttctttccagacattgtttaattctgtgagcgtatggcaaacggtaccgagctcaaaaattgaaaaactagcgtctttttttgctcgaagtcgacatgcttctggcgcggatgaacccgcaggtgcagcccgagaacaacggggcggacacgggtccagagcagccccttcgggcgcgcaaaactgcggagctgctggtggtgaaggagcgcaacggcgtccagtgcctgctggcgccccgcgacggcgacgcgcagccccgggagacctggggcaagaagatcgacttcctgctgtccgtagtcggcttcgcagtggacctggccaacgtgtggcgcttcccctacctctgctacaagaacggcggcggtgccttcttgatcccgtacacactgttccttatcatcgcggggatgcccctgttctacatggagctggctctgggacagtacaaccgggagggggctgccaccgtttggaaaatctgcccattcttcaaaggcgttggctatgctgtcatcctgatcgccctgtacgttggcttctactacaacgtcatcatcgcctggtcactctactacctcttctcctccttcaccctcaacctgccctggaccgactgtggccacacctggaacagccccaactgtaccgaccccaagctcctcaatggctccgtgcttggcaaccacaccaagtactccaagtacaagttcacgccggcagccgagttttatgagcgtggtgtcctgcaccttcacgagagcagcgggattcatgacatcggcctgccccagtggcagctcttgctctgtctgatggtcgtcgtcatcgtcttgtattttagcctctggaaaggggtgaagacatcaggaaaggtggtgtggatcacagccacgctgccttacttcgtgctgttcgtgctcctggtccatggcgtcacgctgcccggagcctccaatggcatcaatgcctacctgcacatcgacttctaccgcttgaaagaggccacggtatggattgatgccgcaactcagatatttttttccttgggggctggatttggagtattgattgcatttgccagttacaacaaatttgacaacaactgttacagggatgccctgctgaccagcagcatcaactgtatcaccagcttcgtctctgggttcgccatcttctccatccttggttacatggcccatgaacacaaggtcaacattgaggatgtggccacagaaggagctggcctagtgttcatcctgtatccagaggccatttctaccctgtctggatctacattctgggctgttgtgtttttcgtcatgctcctggcgctgggccttgacagctcaatgggaggcatggaggctgtcatcacgggcctggcagatgacttccaggtcctgaagcgacaccggaaactcttcacatttggcgtcaccttcagcactttccttctcgccctgttctgcataaccaagggtggaatttacgtcttgaccctcctggacacctttgctgcgggcacctccatcctttttgctgtcctcatggaagccatcggagtttcctggttttatggagtggacaggttcagcaacgacatccagcagatgatggggttcaggccgggtctatactggagactgtgctggaagttcgtcagtcctgccttcctcctgttcgtggttgtggtcagcatcatcaacttcaagccactcacctacgacgactacatcttcccgccctgggccaactgggtggggtggggcatcgccctgtcctccatggtcctggtgcccatctacgtcatctataagttcctcagcacgcagggctctctttgggagagactggcctatggcatcacgccagagaacgagcaccacctggtggctcagagggacatcagacagttccagttgcaacactggctggccatctgattaattaatttttatcgatctaattcaacaatgtctggagagctcggatccttctgtgagcgtatggcaaacgaaggaaaaatagttatagtagccgcactcgatgggacatttcaacgtaaaccgtttaataatattttgaatcttattccattatctgaaatggtggtaaaactaactgctgtgtgtatgaaatgctttaaggaggcttccttttctaaacgattgggtgaggaaaccgagatagagataataggaggtaatgatatgtatcaatcggtgtgtagaaagtgttacgtcggctcataatattatattttttatctaaaaaactaaaaataaacattgattaaattttaatataatacttaaaaatggatgttgtgtcgttagataaaccgtttatgtattttgaggaaattgataatgagttagattacgaaccagaaagtgcaaatgaggtcgcaaaaaaactgccgtatcaaggacagttaaaactattactaggagaattattttttcttagtaagttacagcgacacggtatattagatggtgccaccgtagtgtactagttaacggccgccagtgtgctggaattctagaaaagtagaaaatatattctaatttattgcacgggatgagcgaaaaatacatcgtcacctgggacatgttgcagatccatgcacgtaaactcgcaagccgactgatgccttctgaacaatggaaaggcattattgccgtaagccgtggcggtctggtaccgggtgcgttactggcgcgtgaactgggtattcgtcatgtcgataccgtttgtatttccagctacgatcacgacaaccagcgcgagcttaaagtgctgaaacgcgcagaaggcgatggcgaaggcttcatcgttattgatgacctggtggataccggtggtactgcggttgcgattcgtgaaatgtatccaaaagcgcactttgtcaccatcttcgcaaaaccggctggtcgtccgctggttgatgactatgttgttgatatcccgcaagatacctggattgaacagccgtgggatatgggcgtcgtattcgtcccgccaatctccggtcgctaaggatcagcttggcgtaatcaagccgaattctgcagatatccatcacactggcggccgctcgagcatgcatctagagggcccaattcgccctatagtgagtcgtattacaattcactggccgtcgttttacaacgtcgtgactgggaaaaccctggcgttacccaacttaatcgccttgcagcacatccccctttcgccagctggcgtaatagcgaagaggcccgcaccgatcgcccttcccaacagttgcgcagcctgaatggcgaatggacgcgccctgtagcggcgcattaagcgcggcgggtgtggtggttacgcgcagcgtgaccgctacacttgccagcgccctagcgcccgctcctttcgctttcttcccttcctttctcgccacgttcgccggctttccccgtcaagctctaaatcgggggctccctttagggttccgatttagtgctttacggcacctcgaccccaaaaaacttgattagggtgatggttcacgtagtgggccatcgccctgatagacggtttttcgccctttgacgttggagtccacgttctttaatagtggactcttgttccaaactggaacaacactcaaccctatctcggtctattcttttgatttataagggattttgccgatttcggcctattggttaaaaaatgagctgatttaacaaaaatttaacgcgaattttaacaaaattcagggcgcaagggctgctaaaggaagcggaacacgtagaaagccagtccgcagaaacggtgctgaccccggatgaatgtcagctactgggctatctggacaagggaaaacgcaagcgcaaagagaaagcaggtagcttgcagtgggcttacatggcgatagctagactgggcggttttatggacagcaagcgaaccggaattgccagctggggcgccctctggtaaggttgggaagccctgcaaagtaaactggatggctttcttgccgccaaggatctgatggcgcaggggatcaagatctgatcaagagacaggatgaggatcgtttcgcatgattgaacaagatggattgcacgcaggttctccggccgcttgggtggagaggctattcggctatgactgggcacaacagacaatcggctgctctgatgccgccgtgttccggctgtcagcgcaggggcgcccggttctttttgtcaagaccgacctgtccggtgccctgaatgaactgcaggacgaggcagcgcggctatcgtggctggccacgacgggcgttccttgcgcagctgtgctcgacgttgtcactgaagcgggaagggactggctgctattgggcgaagtgccggggcaggatctcctgtcatcccaccttgctcctgccgagaaagtatccatcatggctgatgcaatgcggcggctgcatacgcttgatccggctacctgcccattcgaccaccaagcgaaacatcgcatcgagcgagcacgtactcggatggaagccggtcttgtcgatcaggatgatctggacgaagagcatcaggggctcgcgccagccgaactgttcgccaggctcaaggcgcgcatgcccgacggcgaggatctcgtcgtgacccatggcgatgcctgcttgccgaatatcatggtggaaaatggccgcttttctggattcatcgactgtggccggctgggtgtggcggaccgctatcaggacatagcgttggctacccgtgatattgctgaagagcttggcggcgaatgggctgaccgcttcctcgtgctttacggtatcgccgctcccgattcgcagcgcatcgccttctatcgccttcttgacgagttcttctgaattgaaaaaggaagagtatgagtattcaacatttccgtgtcgcccttattcccttttttgcggcattttgccttcctgtttttgctcacccagaaacgctggtgaaagtaaaagatgctgaagatcagttgggtgcacgagtgggttacatcgaactggatctcaacagcggtaagatccttgagagttttcgccccgaagaacgttttccaatgatgagcacttttaaagttctgctatgtggcgcggtattatcccgtattgacgccgggcaagagcaactcggtcgccgcatacactattctcagaatgacttggttgagtactcaccagtcacagaaaagcatcttacggatggcatgacagtaagagaattatgcagtgctgccataaccatgagtgataacactgcggccaacttacttctgacaacgatcggaggaccgaaggagctaaccgcttttttgcacaacatgggggatcatgtaactcgccttgatcgttgggaaccggagctgaatgaagccataccaaacgacgagcgtgacaccacgatgcctgtagcaatggcaacaacgttgcgcaaactattaactggcgaactacttactctagcttcccggcaacaattaatagactggatggaggcggataaagttgcaggaccacttctgcgctcggcccttccggctggctggtttattgctgataaatctggagccggtgagcgtgggtctcgcggtatcattgcagcactggggccagatggtaagccctcccgtatcgtagttatctacacgacggggagtcaggcaactatggatgaacgaaatagacagatcgctgagataggtgcctcactgattaagcattggtaactgtcagaccaagtttactcatatatactttagattgatttaaaacttcatttttaatttaaaaggatctaggtgaagatcctttttgataatctcatgaccaaaatcccttaacgtgagttttcgttccactgagcgtcagaccccgtagaaaagatcaaaggatcttcttgagatcctttttttctgcgcgtaatctgctgcttgcaaacaaaaaaaccaccgctaccagcggtggtttgtttgccggatcaagagctaccaactctttttccgaaggtaactggcttcagcagagcgcagataccaaatactgttcttctagtgtagccgtagttaggccaccacttcaagaactctgtagcaccgcctacatacctcgctctgctaatcctgttaccagtggctgctgccagtggcgataagtcgtgtcttaccgggttggactcaagacgatagttaccggataaggcgcagcggtcgggctgaacggggggttcgtgcacacagcccagcttggagcgaacgacctacaccgaactgagatacctacagcgtgagctatgagaaagcgccacgcttcccgaagggagaaaggcggacaggtatccggtaagcggcagggtcggaacaggagagcgcacgagggagcttccagggggaaacgcctggtatctttatagtcctgtcgggtttcgccacctctgacttgagcgtcgatttttgtgatgctcgtcaggggggcggagcctatggaaaaacgccagcaacgcggcctttttacggttcctggccttttgctggccttttgctcacatgttctttcctgcgttatcccctgattctgtggataaccgtattaccgcctttgagtgagctgataccgctcgccgcagccgaacgttgtttaattctgtgagcgtatggcaaacg

SEQ ID NO: 33 - DNA, 6403 bp, Artificial Sequence
  pCR-TK-SEL-G6-FLAG vector
taatttttatcgatctaattcaacaatgtctggagagctcggatccttctgtgagcgtatggcaaacgaaggaaaaatagttatagtagccgcactcgatgggacatttcaacgtaaaccgtttaataatattttgaatcttattccattatctgaaatggtggtaaaactaactgctgtgtgtatgaaatgctttaaggaggcttccttttctaaacgattgggtgaggaaaccgagatagagataataggaggtaatgatatgtatcaatcggtgtgtagaaagtgttacgtcggctcataatattatattttttatctaaaaaactaaaaataaacattgattaaattttaatataatacttaaaaatggatgttgtgtcgttagataaaccgtttatgtattttgaggaaattgataatgagttagattacgaaccagaaagtgcaaatgaggtcgcaaaaaaactgccgtatcaaggacagttaaaactattactaggagaattattttttcttagtaagttacagcgacacggtatattagatggtgccaccgtagtgtactagttaacggccgccagtgtgctggaattctagaaaagtagaaaatatattctaatttattgcacgggatgagcgaaaaatacatcgtcacctgggacatgttgcagatccatgcacgtaaactcgcaagccgactgatgccttctgaacaatggaaaggcattattgccgtaagccgtggcggtctggtaccgggtgcgttactggcgcgtgaactgggtattcgtcatgtcgataccgtttgtatttccagctacgatcacgacaaccagcgcgagcttaaagtgctgaaacgcgcagaaggcgatggcgaaggcttcatcgttattgatgacctggtggataccggtggtactgcggttgcgattcgtgaaatgtatccaaaagcgcactttgtcaccatcttcgcaaaaccggctggtcgtccgctggttgatgactatgttgttgatatcccgcaagatacctggattgaacagccgtgggatatgggcgtcgtattcgtcccgccaatctccggtcgctaaggatcagcttggcgtaatcaagccgaattctgcagatatccatcacactggcggccgctcgagcatgcatctagagggcccaattcgccctatagtgagtcgtattacaattcactggccgtcgttttacaacgtcgtgactgggaaaaccctggcgttacccaacttaatcgccttgcagcacatccccctttcgccagctggcgtaatagcgaagaggcccgcaccgatcgcccttcccaacagttgcgcagcctgaatggcgaatggacgcgccctgtagcggcgcattaagcgcggcgggtgtggtggttacgcgcagcgtgaccgctacacttgccagcgccctagcgcccgctcctttcgctttcttcccttcctttctcgccacgttcgccggctttccccgtcaagctctaaatcgggggctccctttagggttccgatttagtgctttacggcacctcgaccccaaaaaacttgattagggtgatggttcacgtagtgggccatcgccctgatagacggtttttcgccctttgacgttggagtccacgttctttaatagtggactcttgttccaaactggaacaacactcaaccctatctcggtctattcttttgatttataagggattttgccgatttcggcctattggttaaaaaatgagctgatttaacaaaaatttaacgcgaattttaacaaaattcagggcgcaagggctgctaaaggaagcggaacacgtagaaagccagtccgcagaaacggtgctgaccccggatgaatgtcagctactgggctatctggacaagggaaaacgcaagcgcaaagagaaagcaggtagcttgcagtgggcttacatggcgatagctagactgggcggttttatggacagcaagcgaaccggaattgccagctggggcgccctctggtaaggttgggaagccctgcaaagtaaactggatggctttcttgccgccaaggatctgatggcgcaggggatcaagatctgatcaagagacaggatgaggatcgtttcgcatgattgaacaagatggattgcacgcaggttctccggccgcttgggtggagaggctattcggctatgactgggcacaacagacaatcggctgctctgatgccgccgtgttccggctgtcagcgcaggggcgcccggttctttttgtcaagaccgacctgtccggtgccctgaatgaactgcaggacgaggcagcgcggctatcgtggctggccacgacgggcgttccttgcgcagctgtgctcgacgttgtcactgaagcgggaagggactggctgctattgggcgaagtgccggggcaggatctcctgtcatcccaccttgctcctgccgagaaagtatccatcatggctgatgcaatgcggcggctgcatacgcttgatccggctacctgcccattcgaccaccaagcgaaacatcgcatcgagcgagcacgtactcggatggaagccggtcttgtcgatcaggatgatctggacgaagagcatcaggggctcgcgccagccgaactgttcgccaggctcaaggcgcgcatgcccgacggcgaggatctcgtcgtgacccatggcgatgcctgcttgccgaatatcatggtggaaaatggccgcttttctggattcatcgactgtggccggctgggtgtggcggaccgctatcaggacatagcgttggctacccgtgatattgctgaagagcttggcggcgaatgggctgaccgcttcctcgtgctttacggtatcgccgctcccgattcgcagcgcatcgccttctatcgccttcttgacgagttcttctgaattgaaaaaggaagagtatgagtattcaacatttccgtgtcgcccttattcccttttttgcggcattttgccttcctgtttttgctcacccagaaacgctggtgaaagtaaaagatgctgaagatcagttgggtgcacgagtgggttacatcgaactggatctcaacagcggtaagatccttgagagttttcgccccgaagaacgttttccaatgatgagcacttttaaagttctgctatgtggcgcggtattatcccgtattgacgccgggcaagagcaactcggtcgccgcatacactattctcagaatgacttggttgagtactcaccagtcacagaaaagcatcttacggatggcatgacagtaagagaattatgcagtgctgccataaccatgagtgataacactgcggccaacttacttctgacaacgatcggaggaccgaaggagctaaccgcttttttgcacaacatgggggatcatgtaactcgccttgatcgttgggaaccggagctgaatgaagccataccaaacgacgagcgtgacaccacgatgcctgtagcaatggcaacaacgttgcgcaaactattaactggcgaactacttactctagcttcccggcaacaattaatagactggatggaggcggataaagttgcaggaccacttctgcgctcggcccttccggctggctggtttattgctgataaatctggagccggtgagcgtgggtctcgcggtatcattgcagcactggggccagatggtaagccctcccgtatcgtagttatctacacgacggggagtcaggcaactatggatgaacgaaatagacagatcgctgagataggtgcctcactgattaagcattggtaactgtcagaccaagtttactcatatatactttagattgatttaaaacttcatttttaatttaaaaggatctaggtgaagatcctttttgataatctcatgaccaaaatcccttaacgtgagttttcgttccactgagcgtcagaccccgtagaaaagatcaaaggatcttcttgagatcctttttttctgcgcgtaatctgctgcttgcaaacaaaaaaaccaccgctaccagcggtggtttgtttgccggatcaagagctaccaactctttttccgaaggtaactggcttcagcagagcgcagataccaaatactgttcttctagtgtagccgtagttaggccaccacttcaagaactctgtagcaccgcctacatacctcgctctgctaatcctgttaccagtggctgctgccagtggcgataagtcgtgtcttaccgggttggactcaagacgatagttaccggataaggcgcagcggtcgggctgaacggggggttcgtgcacacagcccagcttggagcgaacgacctacaccgaactgagatacctacagcgtgagctatgagaaagcgccacgcttcccgaagggagaaaggcggacaggtatccggtaagcggcagggtcggaacaggagagcgcacgagggagcttccagggggaaacgcctggtatctttatagtcctgtcgggtttcgccacctctgacttgagcgtcgatttttgtgatgctcgtcaggggggcggagcctatggaaaaacgccagcaacgcggcctttttacggttcctggccttttgctggccttttgctcacatgttctttcctgcgttatcccctgattctgtggataaccgtattaccgcctttgagtgagctgataccgctcgccgcagccgaacgttgtttaattctgtgagcgtatggcaaacgagcgcccaatacgcaaaccgcctctccccgcgcgttggccgattcattaatgcagctggcacgacaggtttcccgactggaaagcgggcagtgagcgcaacgcaattaatgtgagttagctcactcattaggcaccccaggctttacactttatgcttccggctcgtatgttgtgtggaattgtgagcggataacaatttcacacaggaaacagctatgaccatgattacgccaagctttgttacagatggaagggtcaaacttaataaaggatatttgttcgactttgtgattagtttgatgcgattcaaaaaagaatcctctctagctaccaccgcaatagatcctgttagatacatagatcctcgtcgtgatatcgcattttctaacgtgatggatatattaaagtcgaataaagtgaacaataattaattctttattgtcatcatgaacggcggacatattcagttgataatcggccccatgttttcaggtaaaagtacagaattaattagacgagttagacgttatcaaatagctcaatataaatgcgtgactataaaatattctaacgataatagatacggaacgggactatggacgcatgataagaataattttgaagcattggaagcaactaaactatgtgatgtcttggaatcaattacagatttctccgtgataggtatcgatgaaggacagttctttccagacattgtttaattctgtgagcgtatggcaaacggtaccgagctcggtttggaattagtgaaagcttaaaaattgaaattttattttttttttttggaatataaataagctcgaagtcgacccaccatggagacagacacactcctgctatgggtactgctgctctgggttccaggttccactggtgacgaggtccaactggtggagtcagggggagggctggtccagcctggagggtccctgaggctctcctgtgcagcctctggattcactatcagcgactactggatccactgggttcgccaggccccgggcaagggcctggagtgggtcgcaggaatcaccccagccggtggttacacctactacgccgactcagtcaagggacgattcaccatctccgccgacacctccaagaacaccgcctacctgcaaatgaacagcctgagggccgaggacacggccgtgtattactgtgcaaggttcgtgttcttcctgccatatgccatggactactggggccaagggaccctggtcaccgtctcctcaggtggtggcggttcaggcggaggtggctctggcggtggcggatcggacattcagatgacccagtctccaagctccctgtccgctagcgtcggagacagggtcactatcacttgcagagcttcccaggacgtctccactgcagtggcatggtaccagcagaagccagggaaggcaccaaagctccttatttactcagcaagcttcctttactccggagtcccatcccgattcagcggcagcggcagtggcacagattttaccctcacaatttcaagcctccaaccagaggatttcgcaacctactactgtcaacaaggctacggcaacccattcaccttcgggcaagggaccaaggttgagattaagcgagactacaaggatgacgacgacaagtaattaat

SEQ ID NO: 34 - protein, 264 aa, Artificial Sequence
  GLAF-2
METDTLLLWVLLLWVPGSTGDEVQLVESGGGLVQPGGSLRLSCAASGFTISDYWIHWVRQAPGKGLEWVAGITPAGGYTYYADSVKGRFTISADTSKNTAYLQMNSLRAEDTAVYYCARFVFFLPYAMDYWGQGTLVTVSSGGGGSGGGGSGGGGSDIQMTQSPSSLSASVGDRVTITCRASQDVSTAVAWYQQKPGKAPKLLIYSASFLYSGVPSRFSGSGSGTDFTLTISSLQPEDFATYYCQQGYGNPFTFGQGTKVEIKR

SEQ ID NO: 35 - protein, 272 aa, Artificial Sequence; identical to SEQ ID NO: 24
  G6-FLAG protein sequence

SEQ ID NO: 36 - protein, 617 aa, Homo sapiens [sequence omitted]

SEQ ID NO: 37 - DNA, 192069 bp, Artificial Sequence
  GLV-1h86 genome (reconstituted)
ttatgagaccatcaaagagagaaagagaataaaaatatttttgtaaaactttttttatgagaccatcaaagagagaaagagaataaaaatatttttgtaaaacttttttatgagaccatcaaagagagaaagagaataaaaatatttttgtaaaacttttttatgagaccatcaaagagagaaagagaataaaaatatttttgtaaaactttttttatgagaccatcaaagagagaaagagaataaaaatatttttgtaaaactttttttatgagaccatcaaagagagaaagagaataaaaatatttttgtaaaactttttttatgagaccatcaaagagagaaagagaataaaaatatttttgtaaaactttttttatgagaccatcaaagagagaaagagaataaaaatatttttgtaaaactttttttatgagaccatcaaagagagaaagagaataaaaatatttttgtaaaactttttttatgagaccatcaaagagagaaagagaataaaaatatttttgtaaaactttttttatgagaccatcaaagagagaaagagaataaaaatatttttgtaaaactttttttatgagaccatcaaagagagaaagagaataaaaatatttttgtaaaactttttttatgagaccatcaaagagagaaagagaataaaaatatttttgtaaaactttttttatgagaccatcaaagagagaaagagaataaaaatatttttgtaaaactttttttatgagaccatcaaagagagaaagagaataaaaatatttttgtaaaactttttttatgagaccatcagaaagaggtttaatatttttgtgatactctgaaaggaaataggaataggaataggaatagtgtcataatcgtatcacactattgagacagaaaaagaagaagtcgcgagaggtaactttttgtgaatgtagttaagaacatttttgttttgcaaaccggaatatagtgtccggtacacttttttaattcgtggtgtgcctgaatcgttcgattaaccctactcatccaatttcagatgaatagagttatcgattcagacacacgctttgagttttgttgaatcgatgagtgaagtatcatcggttgcaccttcagatgccgatccgtcgacatacttgaatccatccttgacctcaagttcagatgattccttgcacatgtctccgatacgaacgctaaactctagattcttgacgcattttgtatcgacgatcgttgaaccgatgatatcttcgtaactcactttcttatgagagatgttagacccgagtactggatgggtcttgatgtcgctgtctttctcttcttcgctacatctgatgtcgatagacacttcacagtctttgatcatagcaagagcttcttcatgagtgatcgcgggagagtccttaccttgtcctggggacacgctggacaatctagcattcactgtgtttccatcagcggattctgagatggatttaatctgaggacatttggtgaatccaaagttcattctcagacctccaccgatgatggagtaataagtggtaggaggatctacatcctcgactgatgtggaatcatcttctgattccacctcgggatctggatctgactcggactctgtaatttccgttacggattggcaaatcttatcattggtcggtgtttggtcttgctttgtgactttgataataacatcgattcccatatgatgtttgttttcttcttccgtacacgaggaggaggatgaggatgattgctgaagactggcaggcatagcagctgccgccaggcacatgcatgccaggacgatatattgtttcataattgctattgattgagtactgttctttatgattctacttccttaccgtgcaataaattagaatatattttctacttttacgagaaattaattattgtatttattatttatgggtgaaaaacttactataaaaagtgggtgggtttggaattagtgatcagtttatgtatatcgcaactaccgggcatatggctatcgacatcgagaacattacccacatgataagagattgtatcagtttcgtagtcttgagtattggtattactatatagtatatagatgtcgcccactagagttactgtctccgaatgcggcatgatagtatcattctttgctttcgttaactgtttggaggaagaatctttgttattgcatttaatctcgaaattcagagtgcacacctttctcctgtaaagaaacctgaagtcgctaccttattaagaacggagaagtatccatcacgaaatacgggattacagtctttatgattcatagtaatagttagttccgacgttgagatggattcgctgagaccggtagtggtcgtccgagtacacgacgtgtcgttaactggatacaggttaatttccacatcgatatagttaaacgtatttctgggtacgggttcgcatttatctgcggaagagacggtgtgagaatatgttccgagaccacacggagaacagatgacgtctccggatactccgtatcctattccacattttgtttgggaaacacatgccttgcatccggatgatcctttgagaagacaataatatccgggagagcattcacagattctattgtgagtcgtgttacacgatcgcgtcttccgttacaacttagacaagcgggtaaatgattattgcgagatgtgaaggtacccgaaccacacggcgtacatcgtgtgttagtcttgctatcgcataatctggaagcgtatgttcccggacacaaattatggcgtttgtattcgttgtctttacactttccatcggatggtgcatgcggtgctatatctcttccgtttattattatacatgagagaaacaatatatacgagtataatacggacttcatgatttaataatgtagtaatcgttgtcttgttcctgtttcctacttctccaatcatatagatattttctttctatcatggataatatttgtaatggttctttccgtacaacatactgtttagatgatattgcgcataatttccggaggcaaatacgatagtctagattgaccgatggtagactctaatttattgagtgctttgtcgacgagtttacttttacgctccatcgatagatggcactgttctatgagatcgtcgtacatgggaaatgaaatgtgactgtctgaatgtatggctttaagatagctgtgataccgtatacaggtcggtgtcggagattcgaatctctttgaggcgacttatgtcacgatgatggaatctatcttatcgaatgatatatttttcataaatacacttttatagtcctcgtttaaacagaatttactatgtagttccgcgaatgactcgtcccttaataggcagtaggctagtatcttttttacgtagtaatcgtcgtagggagagacatcttgtagaacaacgatttcgttttgttttctcttctgtaactgcttttctggatggccgtattgattatcgagcgtgatactcgctccatattccaataaccgctttgcaaattgtatattattgacatcgaccgcgtaatatagtagagttatcgatcatatctatatcatccatgtacttgcttagtatatcaaatacatctatcagtatggtttcataacagtgatacccgcaattattaaatctcgataatatcagaccgtacatacatagacggccattgttcgatacgtgatttacagccgcgtgtccatattttccacgataaaccttacgacgtttacatcgacgagattattattaacaaagtagtcgtgtagaggatagttgttgtccgttatctaacatgcatcgaacgaccatatcgccgtaatgtaagtagtttatcagtatggcttgtacgatggattcatcctgttgtctaaatctctttagaatgttatcgatgatgtagtggttatattctctggaatcgtacgaagtaatactacgcattacgtcgacaagagtatgacgtctctcaataagaagattaacgatttccatgtctacattatatggggttactctaaatcgcttgtttagataatacgcctctaatatagggctgacgtcgtatactctacacgtgtccacatcctttattaataataatttaacaatctctatatctatggttgagaaagaccagtagtattggatgggtaaagatcctccttcgtctctgccatggatggaaacattgttatcgatcaaacatttaattacatccttggatagagattgagattctctatgagacgatatatagtaatgaagagagttcttacacatatcactgtcgtacatacaggtacgaaatacgtaaccggtgctgtaacattctgatttaagaagccatagcaatacttctggtctcggattaggcgtcgttacgtatatatccaccaatccgagaccattgattgcataattcgtattcttggacggacgtatccgtttatccacaattaggtattttagcagacgtaagtcgatattatccgaatacagatcgaaatcatttatattcgacttgagttcgttagaggaatttgaatagctggatatcagtagatgcacaatctgagattttacgtatctatgcttactgtatactcctagcggagttaatccttcgttgtttctacaaagtctctcgactccgcgagagaacaatcttaatgtctgtatcgcatttattggagacgtaacaatgtagcgcattgtttcctcgtctatctatatgttttgataagttgtgacacgtttcaatttctagttttatttttttgtacgtcacatcttcatccagtagacgacatagaatagtgcactctctaccacaataatccatagctattctggtgctaattattcctatttcacgaaggcaatcattcctcataagatgataaaaagtgtagtggagatttagtatttagcagtgcggatatgatccaagagggtgagatagtcgttctcgttcagaatctttcgcagcataagtagtatgtcgatatacttatcgttgaagactctttataaaagtctatttgtttatatttattgcggatagcagtatttccctataaaaagtatacgtcctgtggtgtctttaatcatgtacatgaatggatggtttatgtagaccttcgtacgatataccatcgaaaagttaatcgtaaatactcctgtaacggccgatgcttctgtatactcctcattaacatctataaacgtcgtatgtagaaatttttctacagtgatagtttcattacacatcttgctaaaatctgcataatatccgaatatattagtaagtcctaaattttctaaaatcggtaccagattatacggttctgtcatttccactttaaactttggcatatacaagtctatacttttagtagataacataccacaccattttttaaatttttcatctgttatatttttttctatgttatatataccttctatgtcgtccggtagtataattaccatactagagtttccctcgtatggaatatcgataatagagaatcctccgaataattcattaatatgtacatattgcaagttattctcggtacccaccatcatatcaacgctggtaactatattcttagaaatataaaacttgtctgtatatgtaagatgtttagaaaatggatatttccacattgctttaaaatggacggcgctaacaactgtcatacgagtattaatggatagcggactagtcaataaggaattaattttaccatttgtcattgtcttaacccattcgttgattagttcctttgtttggttagcattattaaagtttacagtttgaaaatcgtcttttattttttgtaggaaggaggcgtggaactcgatactatcgctaccgtatattttatttgcggtagctagtgtcgcacaatacggaatatctacctccatgtcatcattattgtcatcgggtgtattctcattcatattctctatatattttgatagttgttcagctgtagaaccagctgctccatgatttagaatagataaagtagataaaatggaaactggagaaatcaaaacattttcatcagggtgttttaagattagttctttaaagatatccatggtatagacctaacgataacgatatatatcataaataaataatgttaaatttcaatttatgtttgtaccccgtattcatacttaacaaattggtattgcgtacacaatcaatcatattacataccattaataatgcaagcataaaaaattgttagtagatgtttctaaatataggttccgtaagcaaagaatataagaatgaagcggtaatgataaaatcaatcgttatctaaaatgatcatactcatttattttattctattatattaacacatacatttttaacagcaacacattcaatattgtattgttatttttatattatttacacaattaacaatatattattagtttatattactgaattaataatataaaattcccaatcttgtcataaacacacactgagaaacagcataaacacagaatccatcaaaaatgttgataaattatctgatgttgttgttcgctgctatgataatcagatcattcgccgatagtggtaacgctatcgaaacgacattgccagaaattacaaacgctacaacagatattccagctatcagattatgcggtccagagggagatggatattgtttacacggtgactgtatccacgctagagatattgacggtatgtattgtagatgctctcatggttatacaggcattagatgtcagcatgtagtattagtagactatcaacgttcagaaaacccaaacactacaacgtcatatatcccatctcccggtattatgcttgtattagtaggcattattatgtgttgtctattatctgtttataggttcactcgacgaactaaactacctatacaagatatggttgtgccataatttttataaatttttttatgagtatttttacaaaaatgtataaagtgtatgtcttatgtatatttataaaaatgctaagtatgcgatgtatctatgttatttgtatttatctaaacaatacctctacctctagatattatacaaaaattttttatttcggcatattaaagtaaaatctagttaccttgaaaatgaatacagtgggtggttccgtatcaccagtaagaacataatagtcaaatacagtatccgattgagattttgcatacaatactagtctagaaagaaatttgtaatcatcttctgtgacgggagtccatatatctgtatcatcgtctagtttatcagtgtcccatgctatattcctgttatcatcattagttaatgaaaataactctcgtgcttcagaaaagtcaaatattgtatccatacatacatctccaaaactatcgcttatacgtttatctttaacgatacctatacctagatggttatttactaacagacattttccagatctattgactataactcctatagtttccacatcaaccaagtaatgatcatctattgttatataacaataacataactcttttccatttttatcagtatgtatatctatatcaacgtcgtcgttgtagtgaatagtagtcattgatctattatatgaaacggatatgtctagaacggcaattgttttacgtccagttaacactttcgttgatttaaagtctagagtctttgcaaacataatatccttatccgactttatatttcctgtagggtggtataattttattttgcctccacatatcggtgtttccaaatatattactagacaatattccatatagttattagttaagggtacccaattagaacacgtacgcttattatcatcatttggatcgtatttcataaaagttattgtgttatcgatgtcaacacattctacattttttaatcgtctatatagtatttttctgatattttctataatatcagaattgtcttccatcggaagttgtatactatcggaatcagttacatgtttaaataattctctgatgtcattccttatacaatcaaattcattattaaacagtttaatagtctgtagacctttatcgtcgtaaatatccattgtcttattagttacgcttatttttatgtgtttttacgttgctttattatattttataagaatgattgtttgacgaatcacgagaactattaagacacattattaggtatatattataaaaaagtttttgattacgatgttataagaggaaagaggacacattaacatcatacatcaattaactacattcttataacatcgtaatcaaaagaattgcaattttgatgtataacaactgtcaatgggttatggaattgtatattacatattatacggtatgttggtaacgacaaataccggtcggtaattgtctgccggtgtaatagaattatatatatctatctattacaccggccttgtatacataataataagttgtggtagtatgatctccatatttataatttaggactttgtattcagtatttttggaatcataaaaaataaaaaaaagttttactaatttaaaatttaaaaagtatttacatttttttcactgtttagtcgcggatatggaattcgatcctgccaaaatcaatacatcatctatagatcatgtaacaatattacaatacatagatgaaccaaatgatataagactaacagtatgcattatccgaaatattatatcaatatcacaaaaataaatacacatttggctaatcaatttcgggcttggaaaaaacgtatcgccggaagggactatatgactaacttatctagagatacaggaatacaacaatcaaaacttactgaaactatacgtaactgtcaaaaaaatagaaacatatatggtctatatatacactacaatttagttattaattggataaccgatgtgattatcaatcaatattaagagggttggtaaattggtacatagctaataatacctatactccaaatacacccaataatacaacaaccatttctgagttggatatcatcaaaatactaaataaatacgaggacgtgtatagagtaagtaaagaaaaagaatgtggaatttgctatgaagttgtttactcaaaacgatagatactttggtttattggattcgtgtactcatatattttgcataacatgcatcaatatatggcatagaacacgaagagaaaccggtgcgtcggataattgtcctatatgccgtacccgttttagaaacataacaatgagcaagttctataagctagttaactaataaataaaaagtttaatttgttgacgacgtatgtcgttattttttctcgtataaaagattaatttgattctaatataatctttagtattggataaatatcaattcaaattaattccattagattatatcataaataaaaatagtagcacacaactacttcagcaaacattctttttataaatgccatctagcgtagcgaggacacaagtgaacctataattatcaaatttattagtatcagtcacatgaaggactttacgtagagtgacgattccactatctgtggtacgaacggtttcatcttctttgatgccatcacccagatgttctataaacttggtatcctcgtccgatttcatatcctttgccaaccaatacatatagctaaactcaggcatatgttccacacatcctgaacaatgaaattctccagaagatgttacaatgtctagatttggacatttggtttcaaccgcgttaacatatgagtgaacacacccatacatgaaagcgatgagaaataggattctcatcttgccaaaatatcactagaaaaaatttatttatcagttttaaaggtataaaaaatacttattgttgctcgaatattttgtatttgatggtatacggaagattagaaatgtaggtattatcatcaactgattctatggttttatgtattctatcatgtttcactattgcgttggaaataatatcatatgcttccacatatattttattttgttttaactcataatactcacgtaattctggattattggcatatctatgaataattttagctccatgatcagtaaatattaatgagaacatagtattaccacctaccattatttttttcatctcattcaattcttaattgcaaagatctatataatcattatagcgttgacttatggactctggaatcttagacgatgtacagtcatctataatcatggcatatttaatacattgttttatagcatagtcgttatctacgatgttagatatttctctcaatgaatcaatcacacaatctaatgtaggtttatgacataatagcattttcagcagttcaatgtttttagattcgttgatggcaatggctatacatgtatatccgttatttgatctaatgttgacatctgaaccggattctagcagtaaagatactagagattgtttattatatctaacagccttgtgaagaagtgtttctcctcgtttgtcaatcatgttaatgtctttaagataaggtaggcaaatgtttatagtactaagaattgggcaagcataagacatgtcacaaagacccttttttgtatgtataagtgtaaaaattataacatccatagttggatttacataggtgtccaatcgggatctctccatcatcgagataattgatggcatctcccttccttttttagtagatatttcatcgtgtaagaatcaatattaatatttctaaagtatccgtgtatagcctctttatttaccacagctccatattccactagagggatatcgccgaatgtcatatactcaattagtatatgttggaggacatccgagttcattgttttcaatatcaaagagatggtttccttatcatttctccatagtggtacaatactacacattattccgtgcggctttccattttccaaaaacaatttgaccaaatctaaatctacatctttattgtatctataatcactatttagataatcagccataattcctcgagtgcaacatgttagatcgtctatatatgaataagcagtgttatctattcctttcattaacaatttaacgatgtctatatctatatgagatgacttaatataatattgaagagctgtacaatagtttttatctataaaagacggcttgattccgtgattaattagacatttaacaacttccggacgcacatatgctctcgtatccgactctgaatacagatgagagatgatatacagatgcaatacggtaccgcaatttcgtagttgataatcatcatacgcgtatcagtactcgtcctcataaagaacactgcagccattttctatgaacaaatcaataattttagaaacaggatcattgtcattacataattttctataactgaacgatggttttcacatttaacactcaagtcaaatccatgttctaccaacacctttatcaagtcaacgtctacatttttggatttcatatagctgaatatattaaagttatttatgttgctaaatccagtggcttctagtagagccatcgctatatccttattaactttaacatgtctactatttgtgtattcttctaatggggtaagctgtctccaatttttgcgtaatggattagtgccactgtctagtagtagtttgacgacctcgacattattacaatgctcattaaaaaggtatgcgtgtaaagcattattcttgaattggttcctggtatcattaggatctctgtctttcaacatctgtttaagttcatcaagagccacctcctcattttccaaatagtcaaacattttgactgaatgagctactgtgaactctatacacccacacaactaatgtcattaaatatcatgtcaaaaacttgtacaattattaataaaaataatttagtgtttaaattttaccagttccagattttacacctccgttaatacctccattaaccccactggacgatcctcctccccacattccaccgccaccagatgtataagttttagatcctttattactaccatcatgtccatggataaagacactccacatgccgccactaccccctttagaagacatattaataagacttaaggacaagtttaacaataaaattaatcacgagtaccctactaccaacctacactattatatgattatagtttctatttttacagtaccttgactaaagtttctagtcacaagagcaatactaccaacctacactattatatgattatagtttctatttttataggaacgcgtacgagaaaatcaaatgtctaatttctaacggtagtgttgataaacgattgttatccgcggatacctcctctatcatgtcgtctattttcttactttgttctattaacttattagcattatatattatttgattataaaacttatattgcttattagcccaatctgtaaatatcggattattaacatatcgtttctttgtaggtttatttaacatgtacatcactgtaagcatgtccttaccatttattttaatttgacgcatatccgcaatttctttttcgcagtcggttataaattctatatatgatggatacatgctacatgtgtacttataatcgactaatatgaagtacttgatacatattttcagtaacgatttattattaccacctatgaataagtacctgtgatcgtctaggtaatcaactgttttcttaatacattcgatggttggtaatttactcagaataatttccaatatcttaatatataattctgctatttctgggatatatttatctgccagtataacacaaatagtaatacatgtaaacccatattttgttattatattaatgtctgcgccattatctattaaccattctactaggctgacactatgcgactcaatacaatgataaagtatactacatccatgtttatctattttgtttatatcatcaatatacggcttacaaagttttagtatcgataacacatccaactcacgcatagagaaggtagggaataatggcataatatttattaggttatcatcattgtcattatctacaactaagtttccattttttaaaatatactcgacaactttaggatctctattgccaaatttttgaaaatatttatttatatgcttaaatctatataatgtagctccttcatcaatcatacatttaataacattgatgtatactgtatgataagatacatattctaacaatagatcttgtatagaatctgtatatcttttaagaattgtggatattaggatattattacataaactattacacaattctaaaatataaaacgtatcacggtcgaataatagttgatcaactatataattatcgattttgtgatttttcttcctaaactgtttacgtaaatagttagatagaatattcattagttcatgaccactatagttactatcgaataacgcgtcaaatatttcccgtttaatatcgcatttgtcaagataataatagagtgtggtatgttcacgataagtataataacgcatctctttttcgtgtgaaattaaatagtttattacgtccaaagatgtagcataaccatcttgtgacctagtaataatataataatagagaactgttttacccattctatcatcataatcagtggtgtagtcgtaatcgtaatcgtctaattcatcatcccaattataatattcaccagcacgtctaatctgttctattttgatcttgtatccatactgtatgttgctacatgtaggtattcctttatccaataatagtttaaacacatctacattgggatttgatgttgtagcgtatttttctacaatattaataccatttttgatactatttatttctatacctttcgaaattagtaatttcaataagtctatattgatgttatcagaacatagatattcgaatatatcaaaatcattgatatttttatagtcgactgacgacaataacaaaatcacaacatcgtttttgatattattatttttcttggtaacgtatgcctttaatggagtttcaccatcatactcatataatggatttgcaccactttctatcaatgattgtgcactgctggcatcgatgttaaatgttttacaactatcatagagtatcttatcgttaaccatgattggttgttgatgctatcgcattttttggtttctttcatttcagttatgtatggatttagcacgtttgggaagcatgagctcatatgatttcagtactgtagtgtcagtactattagtttcaataagatcaatctctagatctatagaatcaaaacacgataggtcagaagataatgaatatctgtaggcttcttgttgtactgtaacttctggttttgttagatggttgcatcgtgctttaacgtcaatggtacaaattttatcctcgctttgtgtatcatattcgtccctactataaaattgtatattcagattatcatgcgatgtgtatacgctaacggtatcaataaacggagcacaccatttagtcataaccgtaatccaaaaatttttaaagtatatcttaacgaaagaagttgtgtcattgtctacggtgtatggtactagatcctcataagtgtatatatctagagtaatgtttaatttattaaatggttgataatatggatcctcgtgacaatttccgaagatggaaataagacataaacacgcaataaatctaattgcggacatggttactccttaaaaaaatacgaataatcaccttggctatttagtaagtgtcatttaacactatactcatattaatccatggactcataatctctatacgggattaacggatgttctatatacggggatgagtagttctcttctttaactttatactttttactaatcatatttagactgatgtatgggtaatagtgtttgaagagctcgttctcatcatcagaataaatcaatatctctgtttttttgttatacagatgtattacagcctcatatattacgtaatagaacgtgtcatctaccttattaactttcaccgcatagttgtttgcaaatacggttaatcctttgacctcgtcgatttccgaccaatctgggcgtataatgaatctaaactttaattgcttgtaatcattcgaaataatttttagtttgcatccgtagttatcccctttatgtaactgtaaatttctcaacgcgatatctccattaataatgatgtcgaattcgtgctgtatacccatactgaatggatgaacgaataccgacggcgttaatagtaatttactttttcatctttacatattgggtactagttttactatcataagtttataaattccacaagctactatggaataagccaaccatcttagtataccacacatgtcttaaagtttattaattaattacatgttgttttatatatatcgctacgaatttaaagagaaattagtttaggaagaaaaattatctatctacatcatcacgtctctgtattctacgatagagtgctactttaagatgcgacagatccgtgtcatcaaatatatactccattaaaatgattattccggcagcgaacttgatattggatatatcacaacctttgttaatatctacgacaatagacagcagtcccatggttccataaacagtgagtttatctttctttgaagagatattttgtagagatcttataaaactgtcgaatgacatcgcatttatatctttagctaaatcgtatatgttaccatcgtaatatctaaccgcgtctatcttaaacgtttccatcgctttaaagacgtttccgatagatggtctcatttcatcagtcatactgagccaacaaatataatcgtgtataacatctttgatagaatcagactctaaagaaaacgaatcggctttattatacgcattcatgataaacttaatgaaaaatgtttttcgttgtttaagttggatgaatagtatgtcttaataattgttattatttcattaattaatatttagtaacgagtacactctataaaaacgagaatgacataactaatcataactagttatcaaagtgtctaggacgcgtaattttcatatggtatagatcctgtaagcattgtctgtattctggagctattttctctatcgcattagtgagttcagaatatgttataaatttaaatcgaataacgaacataactttagtaaagtcgtctatattaactcttttattttctagccatcgtaataccatgtttaagatagtatattctctagttactacgatctcatcgttgtctagaatatcacatactgaatctacatccaattttagaaattggtctgtgttacatatctcttctatattattgttgatgtattgtcgtagaaaactattacgtagaccattttctttataaaacgaatatatagtactccaattatctttaccgatatatttgcacacataatccattctctcaatcactacatctttaagattttcgttgttaagatatttggctaaactatataattctattagatcatcaacagaatcagtatatatttttctagatccaaagacgaactctttggcgtcctctataatattcccagaaaagatattttcgtgttttagtttatcgagatctgatctgttcatatacgccatgattgtacggtacgttatgataaccgcataaaataaaaatccattttcatttttaaccaatactattcataattgagattgatgtaatactttgttactttgaacgtaaagacagtacacggatccgtatctccaacaagcacgtagtaatcaaatttggtgttgttaaacttcgcaatattcatcaatttagatagaaacttatactcatcatctgttttaggaatccatgtattattaccactttccaacttatcattatcccaggctatgtttcgtccatcatcgttgcgcagagtgaataattcttttgtattcggtagttcaaatatatgatccatgcatagatcggcaaagctattgtagatgtgatttttcctaaatctaatataaaactcgtttactagcaaacactttcctgatttatcgaccaagacacatatggtttctaaatctatcaagtggtggggatccatagttatgacgcagtaacatatattattacattcttgactgtcgctaatatctaaatatttattgttatcgtattggattctgcatatagatggcttgtatgtcaaagatatagaacacataaccaatttatagtcgcgctttacattctcgaatctaaagttaagagatttagaaaacattatatcctcggatgatgttatcactgtttctggagtaggatatattaaagtctttacagatttcgtccgattcaaataaatcactaaataatatcccacattatcatctgttagagtagtatcattaaatctattatattttatgaaagatatatcactgctcacctctatatttcgtacatttttaaactgtttgtataatatctctctgatacaatcagatatatctattgtgtcggtagacgataccgttacatttgaattaatggtgttccattttacaacttttaacaagttgaccaattcatttctaatagtatcaaactctccatgattaaatattttaatagtatccattttatatcactacggacacaaagtagctgacataaaccattgtataatttttatgttttatgtttattagcgtacacattttggaagttccggcttccatgtatttcctggagagcaagtagatgatgaggaaccagatagtttatatccgtacttgcacttaaagtctacattgtcgttgtatgagtatgatcttttaaacccgctagacaagtatccgtttgatattgtaggatgtggacatttaacaatctgacacgtgggtggatcggaccattctcctcctgaacacaggacactagagttaccaatcaacgaatatccactattgcaactataagttacaacgctcccatcggtataaaaatcctcgtatccgttatgtcttccgttggatatagatggaggggattggcatttaacagattcacaaataggtgcctcgggattccataccatagatccagtagatcctaattcacaatacgatttagattcaccgatcaactgatatccgctattacaagagtacgttatactagagccaaagtctactccaccaatatcaagttggccattatcgatatctcgaggcgatgggcatctccgtttaatacattgattaaagagtgtccatccagtacctgtacatttagcatatataggtcccattttttgctttctgtatccaggtagacatagatattctatagtgtctcctatgttgtaattagcattagcatcagtctccacactattcttaaatttcatattaatgggtcgtgacggaatagtacagcatgatagaacgcatcctattcccaacaatgtcaggaacgtcacgctctccaccttcatatttatttatccgtaaaaatgttatcctggacatcgtacaaataataaaaagcccatatatgttcgctattgtagaaattgtttttcacagttgctcaaaaacgatggcagtgacttatgagttacgttacactttggagtctcatctttagtaaacatatcataatattcgatattacgagttgacatatcgaacaaattccaagtatttgattttggataatattcgtattttgcatctgctataattaagatataatcaccgcaagaacacacgaacatctttcctacatggttaaagtacatgtacaattctatccatttgtcttccttaactatatatttgtatagataattacgagtctcgtgagtaattccagtaattacatagatgtcgccgtcgtactctacagcataaactatactatgatgtctaggcatgggagacttttttatccaacgatttttagtgaaacattccacatcgtttaatactacatatttctcatacgtggtataaactccacccattacatatatatcatcgtttacgaataccgacgcgcctgaatatctaggagtaattaagtttggaagtcttatccatttcgaagtgccgtgtttcaaatattctgccacacccgttgaaatagaaaattctaatcctcctattacatataactttccatcgttaacacaagtactaacttctgattttaacgacgacatattagtaaccgttttccattttttcgttttaagatctacccgcgatacggaataaacatgtctattgttaatcatgccgccaataatgtatagacaattatgtaaaacatttgcattatagaattgtctatctgtattaccgactatcgtccaatattctgttctaggagagtaatgggttattgtggatatataatcagagtttttaatgactactatattatgttttataccatttcgtgtcactggctttgtagatttggatatagttaatcccaacaatgatatagcattgcgcatagtattagtcataaacttgggatgtaaaatgttgatgatatctacatcgtttggatttttatgtatccactttaataatatcatagctgtaacatcctcatgatttacgttaacgtcttcgtgggataagatagttgtcagttcatcctttgataattttccaaattctggatcggatgtcaccgcagtaatattgttgattatttctgacatcgacgcattatatagttttttaattccatatcttttagaaaagttaaacatccttatacaatttgtgaaattaatattatgaatcatagtttttacacatagatctactacaggcggaacatcaattattatggcagcaactagtatcatttctacattgtttatggtgatgtttatcttcttccagcgcatatagtctaatagcgattcaaacgcgtgatagtttataccattcaatataatcgcttcatcctttagatggtgatcctgaatgcgtttaaaaaaattatacggagacgccgtaataatttccttattcacttgtataatttccccattgatagaaaatattacgctttccattcttaaagtactataagtaattatagtataatgtaaacgtttatatattcaatatttttataaaaatcattttgacattaattcctttttaaatttccgtctatcatctatagaaacgtattctatgaatttataaaatgcttttacgtgtcctatcgtaggcgatagaaccgctaaaaagcctatcgaatttctacaaaagaatctgttatatggtatagggagagtataaaacattaaatgtccgtacttattaaagtattcagtagccaatcctaactctttcgaatacttattaatggctcttgttctgtacgaatctatttttttgaacaacggacctagtggtatatcttgttctatgtatctaaaataatgtctgactagatccgttagtttaatatccgcagtcatcttgtctagaatggcaaatctaactgcgggtttaggctttagtttagtttctatatctacatctatgtctttatctaacaccaaaaatataatagctaatattttattacaatcatccggatattcttctacgatctcactaactaatgtttctttggttatactagtatagtcactatcggacaaataaagaaaatcagatgatcgatgaataatacatttaaattcatcatctgtaagatttttgagatgtctcattagaatattattagggttagtactcattatcattcggcagctattacttattttattatttttcaccatatagatcaatcattagatcatcaaaatatgtttcaatcatcctaaagagtatggtgaatgactcttcccatctaatttctgaacgttcaccaatgtctctagccactttggcactaatagcgatcattcgcttagcgtcttctatattattaactggttgatttaatctatctagcaatggaccgtcggacagcgtcattctcatgttcttaatcaatgtacatacatcgccgtcatctaccaattcatccaacaacataagctttttaaaatcatcattataataggtttgatcgttgtcatttctccaaagaatatatctaataagtagagtcctcatgcttagttaacaactattttttatgttaaatcaattagtacaccgctatgtttaatacttattcatattttagtttttaggattgagaatcaatacaaaaattaatgcatcattaattttagaaatacttagtttccacgtagtcaatgaaacatttgaactcatcgtacaggacgttctcgtacaggacgtaactataaaccggtttatatttgttcaagatagatacaaatccgataactttttttacgaattctacgggatccactttaaaagtgtcataccgggttctttttatttttttaaacagatcaatggtgtgatgttgattaggtcttttacgaatttgatatagaatagcgtttacatattctccataatggtcaatcgccatttgttcgtatgtcataaattctttaattatatgacactgtgtattatttagttcatccttgttcattgttaggaatctatccaaaatggcaattatactagaactataggtgcgttgtatacacatattgatgtgtctgtttatacaatccatgatatttggatccatgctactaccttcgggtaaaattgtagcatcatataccatttctagtactttaggttcattattatccattgcagaggacgtcatgatcgaatcataaaaaaatatattatttttatgttattttgttaaaaataatcatcgaatacttcgtaagatactccttcatgaacataatcagttacaaaacgtttatatgaagtaaagtatctacgatttttacaaaagtccggatgcataagtacaaagtacgcgataaacggaataataatagatttatctagtctatctttttctatagctttcatagttagatacatggtctcagaagtaggattatgtaacatcagcttcgataaaatgactgggttatttagtcttacacattcgctcatacatgtatgaccgttaactacagagtctacactaaaatgattgaacaatagatagtctaccattgtttcgtattcagatagtacagcgtagtacatggcatcttcacaaattatatcattgtctaatagatatttgacgcatcttatggatcccacttcaacagccatcttaaaatcatattgctttcctttatcattaataatttctagaacatcatctctatcataaaagatacaaatattaactgtttgatccgtaataacattgctagtcaatagcaatttgttaataagatgcgctgggctcaatgtcttaataagaagtgtaagaggactatctccgaatttgttttgtttattaacatccgttgatggaagtaaaagatctataatgtctacattcttgactgttttagagcatacaatatggagaggtgtatttccatcatgatctggttttgagggactaattcctagtttcatcatccatgagattgtagaagcttttggattgtctgacataagatgtctatgaatatgatttttgccaaatttatccactatcctggcttcgaatccgatggacattatttttttaaacactctttctgaaggatctgtacacgccaacaacggaccacatccttcttcatcaaccgagttgttaatcttggctccatactgtaccaataaatttattctctctatgacttcatcatctgttcccgagagataatatagaggtgttttatgctgtttatcacacgcgtttggatctgcgccgtgcgtcagcagcatcgcgactattctattattattaattttagaagctatatgcaatggataatttccatcatcatccgtctcatttggagagtatcctctatgaagaagttcttcgacaaatcgttcatctagtcctttaattccacaatacgcatgtagaatgtgataattatttccagaaggttcgatagcttgtagcatattcctaaatacatctaaatttttactattatatttggcataaagagatagataatactcggccgacataatgttgtccattgtagtataaaaattaatatttctatttctatttctgtatatttgcaacaatttactctctataacaaatatcataacttagtttttttatgtcaagaaggcactggtttagttcatctataaatgtcacgccataactaccacgcatgccatactcagaattatgataaagatatttatccttggggtgtaggtaatggggattaatctttgttggatcagtctctaagttaacacatgtcacacatgatccatttatagttatatcacacgatgatgatttatgaattgattccggaagatcgctatcgtattttgtggttccacaattcatttccatacatgttattgtcacactaatattatgatgaactttatctagccgctgagtggtaaacaacagaacagatagtttattatctttaccaacaccctcagccgctgccacaaatctctgatccgtatccatgatggtcatgtttatttctagtccgtatccagtcaacactatgttagcatttctgtcgatatagctttcactcatatgacactcaccaataatagtagaattaatgtcgtaatttacaccaatagtgagttcggcggcaaagtaccaataccggtaatcttgtcgaggaggacatatagtattcttgtattctaccgaatacccgagagatgcgatacaaaagagcaagactaatttgtaaaccatcttactcaaaatatgtaacaatagtacgatgcaatgagtaagacaataggaaatctatcttatatacacataattattctatcaattttaccaattagttagtgtaatgttaacaaaaatgtgggagaatctaattagtttttctttacacaattgacgtacatgagtctgagttccttgtttttgctaattatttcatccaatttattattcttgacgatatcgagatcttttgtataggagtcaaacttgtattcaacatgcttttctataatcattttagctatttcggcatcatccaatagtacattttccagattagcagaatagatattaatgtcgtatttgaacagagcctgtaacatctcaatgtctttattatctatagccaatttaatgtccggaatgaagagaagggaattattggtgtttgtcgacgtcatatagtcgagcaagagaatcatcatatccacgtgtccattttttatagtgatgtgaatacaactaaggagaatagccagatcaaaagtagatggtatctctgaaagaaagtaggaaacaatacttacatcattaagcatgacggcatgataaaatgaagttttccatccagttttcccatagaacatcagtctccaatttttcttaacaaacagttttaccgtttgcatgttaccactatcaaccgcataatacaatgcggtgtttcccttgtcatcaaattgtgaatcatccagtccactgaatagcaaaatctttactattttggtatcttccaatgtggctgcctgatgtaatggaaattcattctctagaagatttttcaatgctccagcgttcaacaacgtacatactagacgcacgttattatcagctattgcataatacaaggcactatgtccatggacatccgccttaaatgtatctttactagagagaaagcttttcagctgcttagacttccaagtattaattcgtgacagatccatgtctgaaacgagacgctaattagtgtatattttttcattttttataattttgtcatattgcaccagaattaataatatctttaatagatctgattagtagatacatggctatcgcaaaacaacatatacacatttaataaaaataatatttattaagaaaattcagatttcacgtacccatcaatataaataaaataatgattccttacaccgtacccatattaaggagattccaccttacccataaacaatataaatccagtaatatcatgtctgatgatgaacacaaatggtgtattaaattccagtttttcaggagatgatctcgccgtagctaccataatagtagatgcctctgctacagttccttgttcgtcgacatctatctttgcattctgaaacattttataaatatataatgggtccctagtcatatgtttaaacgacgcattatctggattaaacatactaggagccatcatttcggctatcgacttaatatccctcttattttcgatagaaaatttagggagtttaagattgtacactttattccctaattgagacgaccaatagtctaattttgcagccgtgatagaatctgtgaaatgggtcatattatcacctattgccaggtacatactaatattagcatccttatacggaaggcgtaccatgtcatattctttgtcatcgattgtgattgtatttccttgcaatttagtaactacgttcatcatgggaaccgttttcgtaccgtacttattagtaaaactagcattgcgtgttttagtgatatcaaacggatattgccatatacctttaaaatatatagtattaatgattgcccatagagtattattgtcgagcatattagaatctactacattagacataccggatctacgttctactatagaattaattttattaaccgcatctcgtctaaagtttaatctatataggccgaatctatgatattgttgataatacgacggtttaatgcacacagtattatctacgaaactttgataagttagatcagtgtacgtatatttagatgttttcagcttagctaatcctgatattaattctgtaaatgctggacccagatctctttttctcaaatccatagtcttcaataattctattctagtattacctgatgcaggcaatagcgacataaacatagaaaacgaataaccaaacggtgagaagacaatattatcatcttgaatatttttatacgctactataccggcattggtaaatccttgtagacgataggcggacgctgaacacgctaacgatagtatcaataacgcaatcatgattttatggtattaataattaaccttatttttatgttcggtataaaaaaattattgatgtctacacatccttttgtaattgacatctatatatccttttgtataatcaactctaatcactttaacttttacagttttccctaccagtttatccctatattcaacatatctatccatatgcatcttaacactctctgccaagatagcttcagagtgaggatagtcaaaaagataaatatatagagcataatcattctcgtatactctgccctttattacatcacccgcattgggcaacgaataacaaaatgcaagcatcttgttaacgggctcgtaaattgggataaaaattatgtttttattgtcttatatctattttattcaagagaatattcaggaatttctttttccggttgtatctcgtcgcagtatatatcatttgtacattgtttcatattttttaatagtttacaccttttagtaggactagtatcgtacaattcatagctgtattttgaattccaatcacgcataaaaatatcttccaattgttgacgaagacctaatccatcatccggtgtaatattaatagatgctccacatgtatccgtaaagtaatttcctgtccaatttgaggtacctatataggccgttttatcggttaccatatatttggcatggtttaccctagaatacggaatgggaggatcagcatctggtacaataaatagctttacttctatatttatgtttttagattttagcatagcgatagatcttaaaaagtttctcatgataaacgaagatcgttgccagcaactaatcaatagcttaacggatacttgtctgtctatagcggatcttcttaattcatcttctatataaggccaaaacaaaattttacccgccttcgaataaataatagggataaagttcataacagatacataaacgaatttactcgcatttctaatacatgacaataaagcggttaaatcattggttctttccatagtacatagttgttgcggtgcagaagcaataaatacagagtgtggaacgccgcttacgttaatactaagaggatgatctgtattataatacgacggataaaagtttttccaattatatggtagattgttaactccaagataccagtatacctcaaaaatttgagtgagatccgctgccaagttcctattattgaagatcgcaatacccaattccttgacctgagttagtgatctccaatccatgttagcgcttcctaaataaatatgtgtattatcagatatccaaaattttgtatgaagaactcctcctaggatatttgtaatatctatgtatcgtacttcaactccggccatttgtagtctttcaacatcctttaatggtttgttagatttattaacggctactctaactcgtactcctcttttgggtaattgtacaatctcgtttaatattatcgtgccgaaattcgtacccacttcatccgataaactccaataaaaagatgatatatctagtgtttttgtggtattggatagaatttccctccacatgttaaatgtagacaaatatactttatcaaattgcatacctataggaatagtttctgtaatcactgcgattgtattatccggattcattttatttgttaaaagaataatcctatatcacttcactctattaaaaatccaagtttctatttctttcatgactgattttttaacttcatccgtttccttatgaagatgatgtttggcaccttcataaatttttatttctctattacaatttgcatgttgcatgaaataatatgcacctaaaacatcgctaatcttattgtttgttccctggagtatgagagtcggggggtgttaatcttggaaattatttttctaaccttgttggtagccttcaagacctgactagcaaatccagccttaattttttcatgattgactaatgggtcgtattggtatttataaactttatccatatctctagatactgattctggacatagctttccgactggcgcatttggtgtgatggttcccataagtttggcagctagcagattcagtcttgaaacagcatctgcattaactagaggagacattagaatcattgctgtaaacaagtttggattatcgtaagaggctagctcccatggaatgacccaataagtagatttaatagttaccacgtgctgtaccaaagtcatcaatcatcattttttcaccattacttcttccatgtccaatatgatcatgtgagaatactaaaattcctaacgatgatatgttttcagctagttcgtcataacgtccagaatgtttaccagctccatgacttatgaatactaatgccttaggatatgtaataggtttccaatatttacaatatatgtaatcattgtccagattgaacatacagtttgcactcatgattcacgttatataactatcaatattaacagttcgtttgatgatcatattatttttatgttttattgataattgtaaaaacatacaattaaatcaatatagaggaaggagacggctactgtcttttgtaagatagtcatggcgactaaattagattatgaggatgctgttttttactttgtggatgatgataaaatatgtagtcgcgactccatcatcgatctaatagatgaatatattacgtggagaaatcatgttatagtgtttaacaaagatattaccagttgtggaagactgtacaaggaattgatgaagttcgatgatgtcgctatacggtactatggtattgataaaattaatgagattgtcgaagctatgagcgaaggagaccactacatcaattttacaaaagtccatgatcaggaaagtttattcgctaccataggaatatgtgctaaaatcactgaacattggggatacaaaaagatttcagaatctagattccaatcattgggaaacattacagatttgatgaccgacgataatataaacatcttgatactttttctagaaaaaaaattgaattgatgatataggggtcttcataacgcataattattacgttagcattctatatccgtgttaaaaaaaattatcctatcatgtatttgagagttttatatgtagcaaacatgatagctgtgatgccaataagctttagatattcacgcgtgctagtgttagggatggtattatctggtggtgaaatgtccgttatataatctacaaaacaatcatcgcatatagtatgcgatagtagagtaaacatttttatagtttttactggattcatacatcgtctacccaattcggttataaatgaaattgtcgccaatcttacacccaaccccttgttatccattagcatagtattaacttcgttatttatgtcataaactgtaaatgattttgtagatgccatatcatacatgatattcatgtccctattataatcattactaactttatcacaatatatgttgataatatctatatatgatctagtctttgtgggcaactgtctatacaagtcgtctaaacgttgtttactcatatagtatcgaacagccatcattacatggtcccgttccgttgatagataatcgagtatgttagtggacttgtcaaatctatataccatattttctggaagtggatatacatagtcgtgatcaacattattgctagcctcatcttctatatcctgtactataccattatctatatcatctacataatctatgatattattacacataaacatcgacaacatactattgtttattatctaagtcctgttgatccaaacccttgatctcctctatttgtactatctagagattgtacttcttccagttctggataatatatacgttgatagattagctgagctattctatctccagtatttacattaaacgtacattttccattattaataagaatgactcctatgtttcccctataatcttcgtctattacaccacctcctatatcaatgccttttagtgacagaccagacctaggagctattctaccatagcagaacttaggcatggacatactaatatctgtcttaattaactgtctttctcctggagggatagtataatcgtaagcgctatacaaatcatatccggcagcacccggcgattgcctagtaggagatttagctctgttagtttccttaacaaatctaactggtgagttaatattcatgttgaacataaaactaatattttatttcaaaattatttaccatcccatatattccatgaataagtgtgatgattgtacacttctatagtatctatatacgatccacgataaaatcctcctatcaatagcagtttattatccactatgatcaattctggattatccctcggataaataggatcatctatcagagtccatgtattgctggattcacaataaaattccgcatttctaccaaccaagaataaccttctaccgaacactaacgcgcatgatttataatgaggataataagtggatggtccaaactgccactgatcatgattgggtagcaaatattctgtagttgtatcagtttcagaatgtcctcccattacgtatataacattgtttatggatgccactgctggattacatctaggtttcagaagactcggcatattaacccaagcagcatccccgtggaaccaacgctcaacagatgtgggatttggtagacctcctactacgtataatttattgttagcgggtatcccgctagcatacagtctggggctattcatcggaggaattggaatccaattgtttgatatataatttacagctatagcattgttatgtatttcattgttcatccatccaccgatgagatatactacttctccaacatgagtacttgtacacatatggaatatatctataatttgatccatgttcataggatactctatgaatggatacttgtatgatttgcgtggttgtttatcacaatgaaatattttggtacagtctagtatccattttacattatttatacctctgggagaaagataatttgacctgattacatttttgataaggagtagcagatttcctaatttatttcttcgcctcatataccacttaatgacaaaatcaactacataatcctcatctggaacatttagttcatcgctttctagaataagtttcatagatagataatcaaaattgtctatgatgtcatcttccagttccaaaaagtgtttggcaataaagtttttagtatgacataagagattggatagtccgtattctatacccatcatgtaacactcgacacaatattcctttctaaaatctcgtaagataaagtttatacaagtgtagatgataaattctacagaggttaatatagaagcacgtaataaattgacgacgttatgactatctatatatacctttccagtatatgagtaaataactatagaagttaaactgtgaatgtcaaggtctagacaaacccttgtaactggatctttatttttcgtgtatttttgacgtaaatgtgtgcgaaagtaaggagataactttttcaatatcgtagaattgactattatattgcctcctatggcatcaataattgttttgaatttcttagtcatagacaatgctaatatattcttacagtacacagtattgacaaatatcggcatttatgtttctttaaaagtcaacatctagagaaaaatgattatctttttgagacataactcccattttttggtattcacccacacgtttttcgaaaaaattagtttttccttccaatgatatattttccatgaaatcaaacggattggtaacattataaatttttttaaatcccaattcagaaatcaatctatccgcgacgaattctatatatgttttcatcatttcacaattcattcctataagtttaactggaagagccgcagtaagaaattcttgttcaatggatactgcatctgttataatagatctaacggtttcttcactcggtggatgcaataaatgtttaaacatcaaacatgcgaaatcgcagtgcagaccctcgtctctactaattagttcgttggaaaacgtgagtccgggcattaggccacgctttttaagccaaaatatggaagcgaatgatccagaaaagaaaattccttctactgcagcaaaggcaataagtctctctccataaccggcgctgtcatgtatccacttttgagcccaatcggccttcttttttacacaaggcatcgtttctatggcattaaagagatagtttttttcattactatctttaacataagtatcgatcaaaagactatacatttccgaatgaatgttttcaatggccatctgaaatccgtagaaacatctagcctcggtaatctgtacttctgtacaaaatcgttccgccaaattttcattcactattccgtcactggctgcaaaaaacgccaatacatgttttataaaatatttttcgtctggtgttagtttattccaatcattgatatctttagatatatctacttcttccactgtccaaaatgatgcctctgcctttttatacatgttccagatgtcatgatattggattgggaaaataacaaatctatttggatttggtgcaaggatgggttccataactaaattaacaataacaataaattttttttcagttatctatatgcctgtacttggattttttgtacatcgatatcgccgcaatcactacaataattacaagtattattgatagcattgttattagtactatcataattaaattatctacattcatgggtgctgaataatcgttattatcatcattatcattttgtaattgtgacatcatactagataaatcgtttgcgagattgttgtgggaagcgggcatggaggatgcattatcattattatttaacgccttccatttggattcacaaatgttacgcacattcaacattttatggaaactataattttgtgaaaacaaataacaagaaaactcgtcatcgttcaaatttttaacgatagtaaaccgattaaacgtcgagctaatttctaacgctagcgactctgttggatatgggtttccagatatatatcttttcagttcccctacgtatctataatcatctgtaggaaatggaagatatttccatttatctactgttcctaatatcatatgtggtggtgtagtagaaccattaagcgcgaaagatgttatttcgcatcgtattttaacttcgcaataatttctggttagataacgcactctaccagtcaagtcaatgatattagcctttacagatatattcatagtagtcgtaacgatgactccatcttttagatgcgatactcctttgtatgtaccagaatcttcgtacctcaaactcgatatatttaaacaagttaatgagatattaacgcgttttatgaatgatgatatataaccagaagttttatcctcggtggctagcgctataaccttatcattataataccaactagtgtgattaatatgtgacacgtcagtgtgggtacaaatatgtacattatcgtctacgtcgtattcgatacatccgcatacagccaacaaatataaaatgacaaatactctaacgccgttcgtacccatcttgatgcggtttaataaatgttttgatttcaatttattgtaaaaaaagattcggttttatactgttcgatattctcattgcttatattttcatctatcatctccacacagtcaaatccgtggttagcatgcacctcatcaaccggtaaaagactatcggactcttctatcattataactctagaatatttaatttggtcattattaatcaagtcaattatcttatttttaacaaacgtgagtattttactcattttttataaaaacttttagaaatatacagactctatcgtgtgtctatatcttctttttatatccaatgtatttatgtctgatttttcttcatttatcatatataatggtccaaattctacacgtgcttcggattcatccagatcattaaggttcttataattgtaacatccttctcttccctcttctacatcttccttcttattcttattcttagcgtcacagaatctaccacagcaggatcccatgacgagcgtcatattaaactaatccattttcaattataatatatgattagtaatgaccattaaaataaaaaatattcttcataaccggcaagaaagtgaaaagttcacattgaaactatgtcagtagtatacatcatgaaatgatgatatatatatactctattttggtggaggattatatgatataattcgtggataatcatttttaagacacatttctttattcgtaaatcttttcacgttaaatgagtgtccatattttgcaatttcttcatatgatggcggtgtacgtggacgaggctgctcctgttcttgttgtggtcgccgactgtcgtgtctgcgtttagatccctccattatcgcgattgcgtagatggagtactattttataccttgtaattaaatttttttattaattaaacgtataaaaacgttccgtatctgtatttaagagccagatttcgtctaatagaacaaatagctacagtaaaaataactagaataattgctacacccactagaaaccacggatcgtaatacggcaatcggttttcgataataggtggaacgtatattttatttaaggacttaacaattgtctgtaaaccacaatttgcttccgcggatcctgtattaactatctgtaaaagcatatgttgaccgggcggagccgaacattctccgatatctaatttctgtatatctataatattattaacctccgcatacgcattacagttcttttctagcttggataccgcactaggtacatcgtctagatctattcctatttcctcagcgatagctcttctatccttttccggaagcaatgaaatcacttcaataaatgattcaaccatgagtgtgaaactaagtcgagaattactcatgcatttgttagttattcggagcgcgcaatttttaaactgtcctataacctctcctatatgaatagcacaagtgacattagtagggatagaatgttgagctaatttttgtaaataactatctataaaaagattatacaaagttttaaactctttagtttccgccatttatccagtctgagaaaatgtctctcataataaatttttccaagaaactaattgggtgaagaatggaaacctttaatctatatttatcacagtctgttttggtacacatgatgaattcttccaatgccgtactaaattcgatatctttttcgatttctggatatgtttttaataaagtatgaacaaagaaatggaaatcgtaataccagttatgtttaactttgaaattgttttttattttcttgttaatgattccagccacttgggaaaagtcaaagtcgtttaatgccgatttaatacgttcattaaaaacaaactttttatcctttagatgaattattattggttcattggaatcaaaaagtaagatattatcgggtttaagatctgcgtgtaaaaagttgtcgcaacagggtagttcgtagattttaatgtataacagagccatctgtaaaaagataaactttatgtattgtaccaaagatttaaatcctaatttgatagctaactcggtatctactttatctgccgaatacagtgctaggggaaaaattataatgtttcctctttcatattcgtagttagttctcttttcatgttcgaaaaagtgaaacatgcggttaaaatagtttataacattaatattactgttaataactgccggataaaagtgggatagtaatttcacgaatttgatactgtcctttctctcgttaaacgcctttaaaaaaactttagaagaatatctcaatgagagttcctgaccatccatagtttgtatcaataatagcaacatatgaagaacacgtttatacagagtatgtaaaaatgttaatttatagtttaatcccatggcccacgcacacacgattaattttttttcatctccctttagattgttgtatagaaatttgggtactgtgaactccgccgtagtttccatgggactatataattttgtggcctcgaatacaaattttactacatagttatctatcttaaagactataccatatcctcctgtagatatgtgataaaaatcgtcgtttataggataaaatcgtttatccttttgttggaaaaaggatgaattaatgtaatcattctcttctatctttagtagtgtttccttattaaaattcttaaaataatttaacaatctaactgacggagcccaattttggtgtaaatctaattgggacattatattgttaaaatacaaacagtctcctaatataacagtatctgataatctatggggagacatccattgatattcaggggatgaatcattggcaacacccatttattgtacaaaaagccccaatttacaaacgaaagtccaggtttgatagagacaaacaattaactattttgtctctgtttttaacacctccacagtttttaatttctttagtaatgaaattattcacaatatcagtatcttctttatctaccagagattttactaacttgataaccttggctgtctcattcaatagggtagtaatatttgtatgtgtgatattgatatctttttgaattgtttcttttagaagtgattctttgatggtgccagcatacgaattacaataatgcagaaactcggttaacatgcaggaattatagtaagccaattccaattgttgcctgtgttgtattagagtgtcaatatgagcaatggtgtccttgcgtttctctgatagaatgcgagcagcgattttggcgttatcatttgacgatatttctggaatgacgaatcctgtttctactaactttttggtaggacaaagtgaaacaatcaagaagatagcttctcctcctatttgtggaagaaattgaactcctctagatgatctactgacgatagtatctccttgacagatattggaccgaattacagaagtacctggaatgtaaagccctgaaaccccctcattttttaagcagattgttgccgtaaatcctgcactatgcccaagatagagagctcctttggtgaatccatctctatgtttcagtttaaccaagaaacagtcagctggtctaaaatttccatctctatctaatacagcatctaacttgatgtcaggaactatgaccggtttaatgttatatgtaacattgagtaaatccttaagttcataatcatcactgtcatcagttatgtacgatccaaacaatgtttctaccggcatagtggatacgaagatgctatccatcagaatgtttccctgattagtattttctatatagctattcttctttaaacgattttccaaatcagtaactatgttcatttttttaggagtaggacgcctagccagtatggaagaggattttctagatcctctcttcaacatctttgatctcgatggaatgcaaaaccccatagtgaaacaaccaacgataaaaataatattgtttttcactttttataattttaccatctgactcatggattcattaatatctttataagagctactaacgtataattctttataactgaactgagatatatacaccggatctatggtttccataattgagtaaatgaatgctcggcaataactaatggcaaatgtatagaacaacgaaattatactagagttgttaaagttaatattttctatgagctgttccaataaattatttgttgtgactgcgttcaagtcataaatcatcttgatactatccagtaaaccgtttttaagttctggaatattatcatcccattgtaaagcccctaattcgactatcgaatatcctgctctgatagcagtttcaatatcgacggacgtcaatactgtaataaaggtggtagtattgtcatcatcgtgataaactacgggaatatggtcgttagtaggtacggtaactttacacaacgcgatatataactttccttttgtaccatttttaacgtagttgggacgtcctgcagggtattgttttgaagaaatgatatcgagaacagatttgatacgatatttgttggattcctgattattcactataatataatctagacagatagatgattcgataaatagagaaggtatatcgttggtaggataatacatccccattccagtattctcggatactctattgatgacactagttaagaacatgtcttctattctagaaaacgaaaacatcctacatggactcattaaaacttctaacgctcctgattgtgtctcgaatgcctcgtacaaggatttcaaggatgccatagattctttgaccaacgatttagaattgcgtttagcatctgatttttttattaaatcgaatggtcggctctctggtttgctaccccaatgataacaatagtcttgtaaagataaaccgcaagaaaatttatacgcatccatccaaataaccctagcaccatcggatgatattaatgtattattatagattttccatccacaattattgggccagtatactgttagcaacggtatatcgaatagattactcatgtaacctactagaatgatagttcgtgtactagtcataatatctttaatccaatctaaaaaatttaaaattagattttttacactgttaaagttaacaaaagtattacccgggtacgtggatatcatatatggcattggtccattatcagtaatagctccataaactgatacggcgatggtttttatatgtgtttgatctaacgaggaagaaattcgcgcccacaattcatctctagatatgtatttaatatcaaacggtaacacatcaatttcgggacgcgtatatgtttctaaatttttaatccaaatataatgatgacctatatgccctattatcatactgtcaactatagtacacctagggaacttacgatacatctgtttcctataatcgttaaattttacaaatctataacatgctaaaccttttgacgacagccattcattaatttctgatatggaatctgtattctcgataccgtatcgttctaaagccagtgctatatctccctgttcgtgggaacgctttcgtataatatcgatcaacggataatctgaagtttttggagaataatatgactcatgatctatttcgtccataaacaatctagacataggaattggaggcgatgatcttaattttgtgcaatgagtcgtcaatcctataacttctaatcttgtaatattcatcatcgacataatactatctatgttatcatcgtatattagtataccatgaccttcttcatttcgtgccaaaatgatatacagtcttaaatagttacgcaatatctcaatagtttcataattgttagctgttttcatcaaggtttgtatcctgtttaacatgatggcgttctataacgtctctattttctatttttaattttttaaatttttaacgatttactgtggctagatacccaatctctctcaaatatttttttagcctcgcttacaagctgtttatctatactattaaaactgacgaatccgtgattttggtaatgggttccgtcgaaatttgccgaagtgatatgaacatattcgtcgtcgactatcaacaattttgtattattctgaatagtgaaaaccttcacagatagatcattttgaacacacaacgcatctagacttttggcggttgccatagaatatacgtcgttcttatcccaattaccaactagaagtctgatcttaactcctctattaatggctgcttctataatggagttgtaaatgtcgggccaatagtagctattaccgtcgacacgtgtagtgggaactatggccaaatgttcaatatctatactagtcttagctgacctgagtttatcaataactacatcggtatctagatctctagaatatcccaataggtgttccggagaatcagtaaagaacactccacctataggattcttaatatgatacgcagtgctaactggcaaacaacaagccgcagagcataaattcaaccatgaattttttgcgctattaaaggctttaaaagtatcaaatcttctacgaagatctgtggccagcgggggataatcagaatatacacctaacgttttaatcgtatgtatagatcctccagtaaatgacgcgtttcctacataacatctttcatcatctgacacccaaaaacaaccgagtagtagtcccacattattttttttatctatattaacggttataaaatttatatccgggcagtgactttgtagctctcccagatttcttttccctcgttcatctagcaaaactattattttaatccctttttcagatgcctcttttagtttatcaaaaataagcgctcccctagtcgtactcagaggattacaacaaaaagatgctatgtatatatatttcttagctagagtgataatttcgttaaaacattcaaatgttgttaaatgatcggatctaaaatccatattttctggtagtgtttctaccagcctacattttgctcccgcaggtaccgatgcaaatggccacatttagttaacataaaaacttatacatcctgttctatcaacgattctagaatatcatcggctatatcgctaaaattttcatcaaagtcgacatcacaacctaactcagtcaatatattaagaagttccatgatgtcatcttcgtctatttctatatccgtatccattgtagattgttgaccgattatcgagtttaaatcattactaatactcaatccttcagaatacaatctgtgtttcattgtaaatttataggcggtgtatttaagttggtagattttcaattatgtattaatatagcaacagtagttcttgctcctccttgattctagcatcctcttcattattttcttctacgtacataaacatgtccaatacgttagacaacacaccgacgatggcggccgcagatctcgagttatgatctacttccttaccgtgcaataaattagaatatattttctacttttacgagaaattaattattgtatttattatttatgggtgaaaaacttactataaaaagcgggtgggtttggaattagtgaaagcttaaaaattgaaattttattttttttttttggaatataaataagctcgaagtcgacagatctaggcctggtaccaggaggaggaattcagcttaaagatgacttcgaaagtttatgatccagaacaaaggaaacggatgataactggtccgcagtggtgggccagatgtaaacaaatgaatgttcttgattcatttattaattattatgattcagaaaaacatgcagaaaatgctgttatttttttacatggtaacgcggcctcttcttatttatggcgacatgttgtgccacatattgagccagtagcgcggtgtattataccagatcttattggtatgggcaaatcaggcaaatctggtaatggttcttataggttacttgatcattacaaatatcttactgcatggtttgaacttcttaatttaccaaagaagatcatttttgtcggccatgattggggtgcttgtttggcatttcattatagctatgagcatcaagataagatcaaagcaatagttcacgctgaaagtgtagtagatgtgattgaatcatgggatgaatggcctgatattgaagaagatattgcgttgatcaaatctgaagaaggagaaaaaatggttttggagaataacttcttcgtggaaaccatgttgccatcaaaaatcatgagaaagttagaaccagaagaatttgcagcatatcttgaaccattcaaagagaaaggtgaagttcgtcgtccaacattatcatggcctcgtgaaatcccgttagtaaaaggtggtaaacctgacgttgtacaaattgttaggaattataatgcttatctacgtgcaagtgatgatttaccaaaaatgtttattgaatcggatccaggattcttttccaatgctattgttgaaggcgccaagaagtttcctaatactgaatttgtcaaagtaaaaggtcttcatttttcgcaagaagatgcacctgatgaaatgggaaaatatatcaaatcgttcgttgagcgagttctcaaaaatgaacaagcggccgccgccaccatgagcaagggcgaggaactgttcactggcgtggtcccaattctcgtggaactggatggcgatgtgaatgggcacaaattttctgtcagcggagagggtgaaggtgatgccacatacggaaagctcaccctgaaattcatctgcaccactggaaagctccctgtgccatggccaacactggtcactaccttcacctatggcgtgcagtgcttttccagatacccagaccatatgaagcagcatgactttttcaagagcgccatgcccgagggctatgtgcaggagagaaccatctttttcaaagatgacgggaactacaagacccgcgctgaagtcaagttcgaaggtgacaccctggtgaatagaatcgagctgaagggcattgactttaaggaggatggaaacattctcggccacaagctggaatacaactataactcccacaatgtgtacatcatggccgacaagcaaaagaatggcatcaaggtcaacttcaagatcagacacaacattgaggatggatccgtgcagctggccgaccattatcaacagaacactccaatcggcgacggccctgtgctcctcccagacaaccattacctgtccacccagtctgccctgtctaaagatcccaacgaaaagagagaccacatggtcctgctggagtttgtgaccgctgctgggatcacacatggcatggacgagctgtacaagtgagcggccgccctgctagcaagcttgctagcggccgctcgagatctgcggccgctacagacacgaatatgactaaaccgatgaccatttaaaaacccctctctagctttcacttaaactgtatcgatcattcttttagcacatgtataatataaaaacattattctatttcgaatttaggcttccaaaaatttttcatccgtaaaccgataataatatatatagacttgttaatagtcggaataaatagattaatgcttaaactatcatcatctccacgattagagatacaatatttacattctttttgctgtttcgaaactttatcaatacacgttaatacaaacccaggaaggagatattgaaactgaggctgttgaaaatgaaacggtgaatacaataattcagataatgtaaaatcatgattccgtattctgatgatattagaactgctaatggatgtcgatggtatgtatctaggagtatctattttaacaaagcatcgatttgctaatatacaattatccttttgattaattgttattttattcatattcttaaaaggtttcatatttatcaattcttctacattaaaaatttccatttttaatttatgtagccccgcaatactcctcattacgtttcattttttgtctataatatccattttgttcatctcggtacatagattatccaattgagaagcgcatttagtagttttgtacattttaagtttattgacgaatcgtcgaaaactagttatagttaacattttattatttgataccctgatattaatacccctgccgttactattatttataactgatgtaatccacgtaacattggaattaactatcgatagtaatgcatcgacgcttccaaaattgtctattataaactcaccgataatttttttattgcatgttttcatattcattaggattatcaaatctttaatcttattacgattgtatgcgttgatattacaagacgtcattctaaaagacggaggatctccatcaaatgccagacaatcacgtacaaagtacatggaaataggttttgttctattgcgcatcatagatttatatagaacacccgtagaaatactaatttgttttactctataaaatactaatgcatctatttcatcgttttgtataacgtctttccaagtgtcaaattccaaatttttttcattgatagtaccaaattcttctatctctttaactacttgcatagataggtaattacagtgatgcctacatgccgttttttgaaactgaatagatgcgtctagaagcgatgctacgctagtcacaatcaccactttcatatttagaatatatatatgtaaaaatatagtagaatttcattttgtttttttctatgctataaatgaattctcattttgcatctgctcatactccgttttatattaataccaaagaaggaagatatctggttctaaaagccgttaaagtatgcgatgttagaactgtagaatgcgaaggaagtaaagcttcctgcgtactcaaagtagataaaccctcatcgcccgcgtgtgagagaagaccttcgtccccgtccagatgcgagagaatgaataaccctggaaaacaagttccgtttatgaggacggacatgctacaaaatatgttcgcggctaatcgcgataatgtagcttctagacttttgtcctaaaatactattatatccttttcgatattaataaatccgtgtcgtccaggttttttatctctttcagtatgtgaatagataggtattttatctctattcatcatcgaatttaagagatccgataaacattgtttgtattctccagatgtcagcatctgatacaacaatatatgtgcacataaacctctggcacttatttcatgtaccttccccttatcactaaggagaatagtatttgagaaatatgtatacatgatattatcatgaattagatatacagaatttgtaacactctcgaaatcacacgatgtgtcggcgttaagatctaatatatcactcgataacacattttcatctagatacactagacattttttaaagctaaaatagtctttagtagtaacagtaactatgcgattattttcatcgatgatacatttcatcggcatattattacgcttaccatcaaagactataccatgtgtatatctaacgtattctagcatggttgccatacgcgcattaaacttttcaggatctttggatagatcttccaatctatctatttgagaaaacatttttatcatgttcaatagttgaaacgtcggatccactatatagatattatctataaagattttaggaactacgttcatggtatcctggcgaatattaaaactatcaatgatatgattatcgttttcatcttttatcaccatatagtttctaagatatgggattttacttaatataatattatttcccgtgataaattttattagaaaggccaaatctataagaaaagtcctagaattagtctgaagaatatctatatcgccgtatagtatatttggattaattagatatagagaatatgatccgtaacatatacaacttttattatggcgtctaagatattcttccatcaacttattaacatttttgactagggaagatacattatgacgtcccattacttttgccttgtctattactgcgacgttcatagaatttagcatatctcttgccaattcttccattgatgttacattataagaaattttagatgaaattacatttggagctttaatagtaagaactcctaatatgtccgtgtatgtggtcactaatacagattgtagttctataatcgtaaataatttacctatattatatgtttgagtctgtttagaaaagtagctaagtatacgatcttttatttctgatgcagatgtattaacatcggaaaaaaatctttttttattcttttttactaaagatacaaatatgtctttgttaaaaacagttattttctgaatatttctagcttgtaattttaacatatgatattcgttcacactaggtactctgcctaaataggtttctataatctttaatgtaatattaggaaaagtattctgatcaggattcctattcattttgaggatttaaaactctgattattgtctaatatggtctctacgcaaactttttcacagagcgatagagtttttgataactcgtttttcttaagaaatataaaactactgtctccagagctcgctctatcttttattttatctaattcgatacaaactcctgatactggttcagaaagtaattcattaattttcagtcctttatagaagatatttaatatagataatacaaaatcttcagtttttgatatcgatctgattgatcctagaactagatatattaataacgtgctcattaggcagtttatggcagcttgataattagatatagtatattccagttcatatttattagataccgcattgcccagattttgatattctatgaattcctctgaaaataaatccaaaataactagacattctattttttgtggattagtgtactctcttccctctatcatgttcactactggtgtccacgatgataaatatctagagggaatataatatagtccataggatgccaatctagcaatgtcgaataactgtaattttattcttcgctcttcattatgaattgattcttgaggtataaacctaacacaaattatattattagacttttcgtatgtaatgtctttcatgttataagtttttaatcctggaatagaatctattttaatgaggcttttaaacgcagagttctccaacgagtcaaagcataatactctgttgtttttcttatatacgatgttacgattttcttctttgaatggaataggtttttgaattagtttataattacaacataatagataaggaagtgtgcaaatagtacgcggaaaaaacataatagctcccctgttttcatccatggttttaagtaaatgatcactggcttctttagtcaatggatattcgaacattaaccgtttcatcatcattggacagaatccatatttcttaatgtaaagagtgatcaaatcattgtgtttattgtaccatcttgttgtaaatgtgtattcggttatcggatctgctcctttttctattaaagtatcgatgtcaatctcgtctaagaattcaactatatcgacatatttcatttgtatacacataaccattactaacgtagaatgtataggaagagatgtaacgggaacagggtttgttgattcgcaaactattctaatacataattcttctgttaatacgtcttgcacgtaatctattatagatgccaagatatctatataattattttgtaagatgatgttaactatgtgatctatataagtagtgtaataattcatgtattttgatatatgttccaactctgtctttgtgatgtctagtttcgtaatatctatagcatcctcaaaaaatatattcgcatatattcccaagtcttcagttctatcttctaaaaaatcttcaacgtatggaatataataatctattttacctcttctgatatcattaatgatatagtttttgacactatcttctgtcaattgattcttattcactatatctaagaaacggatagcgtccctaggacgaactactgccattaatatctctattatagcttctggacataattcatctattataccagaattaatgggaactattccgtatctatctaacatagttttaagaaagtcagaatctaagacttgatgttcatatattggttcatacatgaaatgatctctattgatgatagtgactatttcattctctgaaaattggtaactcattctatatatgctttccttgttgatgaaggatagaatatactcaatagaatttgtaccaacaaactgttctcttatgaatcgtatatcatcatctgaaataatcatgtaaggcatacatttaacaattagagacttgtctcctgttatcaatatactattcttgtgataatttatgtgtgaggcaaatttgtccacgttctttaattttgttatagtagatatcaaatccaatggagctacagttcttggcttaaacagatatagtttttctggaacaaattctacaacattattataaaggactttgggtagataagtgggatgaaatcctattttaattaatgcgatagccttgtcctcgtgcagatatccaaacgcttttgtgatagtatggcattcattgtctagaaacgctctacgaatatctgtgacagatatcatctttagagaatatactagtcgcgttaatagtactacaatttgtattttttaatctatctcaataaaaaaattaatatgtatgattcaatgtataactaaactactaactgttattgataactagaatcagaatctaatgatgacgtaaccaagaagtttatctactgccaatttagctgcattatttttagcatctcgtttagattttccatcggccttatcgaatactcttccgtcgatgtctacacaggcataaaatgtaggagagttactaggcccaactgattcaatacgaaaagaccaatctctcctagtaatttggcagtactcattaataacggtgacagggttagcatctttccaatcaataatttttttagccggaataacatcatcaaaagacttatgatcctctctcattgatttttcgcgggatacatcatctattatgacgtcagccatagcatcagcatccggcttatccgcctccgttgtcataaaccaacgaggaggaatatcgtcggagctgtacaccatagcactacgttgaagatcgtacagagctttattaacttctcgcttctccatattaagttgtctagttagttgtgcagcagtagctccttcgattccaatgtttttaatagccgcacacacaatctctgcgtcagaacgctcgtcaatatagatcttagacatttttagagagaactaacgcaaccagcaataaaactgaacctactttatcatttttttattcatcatcctctggtggttcgtcgttcctatcaaatgtagctctgattaacccgtcatctataggtgatgctggttctggagattctggaggagatggattattatctggaagaatctctgttatttccttgttttcatgtatcgattgcgttgtaacattaagattgcgaaatgctctaaatttgggaggcttaaagtgttgtttgcaatctctacacgcgtgtctaactagtggaggttcgtcagctgctctagtttgaatcatcatcggcgtagtattcctacttttacagttaggacacggtgtattgtatttctcgtcgagaacgttaaaataatcgttgtaactcacatcctttattttatctatattgtattctactcctttcttaatgcattttataccgaataagagatagcgaaggaattctttttcggtgccgctagtacccttaatcatatcacatagtgttttatattccaaatttgtggcaatagacggtttatttctatacgatagtttgtttctggaatcctttgagtattctataccaatattattctttgattcgaatttagtttcttcgatattagattttgtattacctatattcttgatgtagtactttgatgatttttccatggcccattctattaagtcttccaagttggcatcatccacatattgtgatagtaattctcggatatcagtagcggctaccgccattgatgtttgttcattggatgagtaactactaatgtatacattttccatttataacacttatgtattaactttgttcatttatattttttcattattatgttgatattaacaaaagtgaatatatatatgttaataattgtattgtggttatacggctacaattttataatgagtgaaagtcagtgtccgatgatcaatgacgatagctttactctgaaaagaaagtatcaaatcgatagtgcggagtcaacaataaaaatggataagaagaggataaagtttcagaatagagccaaaatggtaaaagaaataaatcagacaataagagcagcacaaactcattacgagacattgaaactaggatacataaaatttaagagaatgattatgactactactctagaagatatagcaccatctattccaaataatcagaaaacttataaactattctcggacatttcagccatcggcaaagcatcacagaatccgagtaagatggtatatgctctgctgctttacatgtttcccaatttgtttggagatgatcatagattcattcgttatagaatgcatccaatgagtaaaatcaaacacaagatcttctctcctttcaaacttaatcttattagaatattagtggaagaaagattctataataatgaatgcagatctaataaatggagaataattggaacacaagttgataaaatgttgatagctgaatctgataaatatacaatagatgcaaggtataacctaaaacccatgtatagaatcaagggagaatctgaagaagataccctctttatcaaacagatggtagaacaatgtgtgacatcccaggaattggtggaaaaagtgttgaagatactgtttagagatttgttcaagagtggagaatacaaagcgtacagatacgatgatgatgtagaaaatggatttattggattggatacactaaaattaaacattgttcatgatatagttgaaccatgtatgcctgttcgtaggccagtggctaagatactgtgtaaagaaatggtaaataaatactttgagaatccgctacatattattggtaaaaatcttcaagagtgcattgactttgttagtgaataggcatttcatctttctccaatactaattcaaattgttaaattaataatggatagtataaatagttattagttataagatagtaaaaataattattagaataagagtgtagtatcatagataactctcttctataaaaatggattttattcgtagaaagtatcttatatacacagtagaaaataatatagattttttaaaggatgatacattaagtaaagtaaacaattttaccctcaatcatgtactagctctcaagtatctagttagcaattttcctcaacacgttattactaaggatgtattagctaataccaatttttttgttttcatacatatggtacgatgttgtaaagtgtacgaagcggttttacgacacgcatttgatgcacccacgttgtacgttaaagcattgactaagaattatttatcgtttagtaacgcaatacaatcgtacaaggaaaccgtgcataaactaacacaagatgaaaaatttttagaggttgccgaatacatggacgaattaggagaacttataggcgtaaattatgacttagttcttaatccattatttcacggaggggaacccatcaaagatatggaaatcatttttttaaaactgtttaagaaaacagacttcaaagttgttaaaaaattaagtgttataagattacttatttgggcatacctaagcaagaaagatacaggcatagagtttgcggataatgatagacaaaatatatacactctatttcaacaaactggtagaatcgtccatagcaatctaacagaaacgtttagagattatatctttcccggagataagactagctattgggtgtggttaaacgaaagtatagctaatgatgcggatatcgttcttaatagacacgccattaccatgtatgataaaattcttagttatatatactctgagataaaacaaggacgcgttaataaaaacatgcttaagttagtttatatctttgagcctgaaaaagatatcagagaacttctgctagaaatcatatatgatattcctggagatatcctatctattattgatgcaaaaaacgacgattggaaaaaatattttattagtttttataaagctaattttattaacggtaatacatttattagtgatagaacgtttaacgaggacttattcagagttgttgttcaaatagatcccgaatatttcgataatgaacgaattatgtctttattctctacgagtgctgcggacattaaacgatttgatgagttagatattaataacagttatatatctaatataatttatgaggtgaacgatatcacattagatacaatggatgatatgaagaagtgtcaaatctttaacgaggatacgtcgtattatgttaaggaatacaatacatacctgtttttgcacgagtcggatcccatggtcatagagaacggaatactaaagaaactgtcatctataaaatccaagagtagacggctgaacttgtttagcaaaaacattttaaaatattatttagacggacaattggctcgtctaggtcttgtgttagatgattataaaggagacttgttagttaaaatgataaaccatcttaagtctgtggaggatgtatccgcattcgttcgattttctacagataaaaaccctagtattcttccatcgctaatcaaaactattttagctagttataatatttccatcatcgtcttatttcaaaggtttttgagagataatctatatcatgtagaagaattcttggataaaagcatccatctaaccaagacggataagaaatatatacttcaattgataagacacggtagatcatagaacagaccaaatatattattaataatttgtatatacatagatataattatcacacatttttgataaatgggaactgctgcaacaattcagactcccaccaaattaatgaataaagaaaatgcagaaatgattttggaaaaaattgttgatcatatagttatgtatattagtgacgaatcaagtgattcagaaaataatcctgaatatattgattttcgtaacagatacgaagactatagatctctcattataaaaagtgatcacgagtttgtaaagctatgtaaaaatcatgcggagaaaagttctccagaaacgcaacaaatgattatcaaacacatatacgaacaatatcttattccagtatctgaagtactattaaaacctataatgtccatgggtgacataattacatataacggatgtaaagacaatgaatggatgctagaacaactctctaccctaaactttaacaatctccgcacatggaactcatgtagcataggcaatgtaacgcgtctgttttatacattttttagttatctgatgaaagataaactaaatatataagtataatcccattctaatactttaacctgatgtattagcatcttattagaatattaacctaactaaaagacataacataaaaactcattacatagttgataaaaagcggtaggatataaatattatggctgccaccgttccgcgttttgacgacgtgtacaaaaatgcacaaagaagaattctagatcaagaaacattttttagtagaggtctaagtagaccgttaatgaaaaacacatatctatttgataattacgcgtatggatggataccagaaactgcaatttggagtagtagatacgcaaacctagatgctagtgactattatcccatttcgttgggattacttaaaaagttcgagtttctcatgtctctatataaaggtcctattcccgtatatgaagaaaaagtaaatactgaattcatagccaatggatcgttctctggtagatacgtatcatatcttcgaaagttttctgcccttccaacaaacgagtttattagttttttgttactgacttccattccaatctataatatcttgttctggtttaaaaacacacagtttgatattactaaacacacattattcagatacgtctatacagataatgccaaacacctggcgttggctaggtatatgcatcaaacaggagactataagcctttgtttagtcgtctcaaagagaattatatatttaccggtcccgttccaataagtatcaaagatatagatcaccctaatcttagtagagcaagaagtccatccgattatgagacattagctaatattagtactatattgtactttaccaagtatgatccggtattaatgtttttattgttttacgtacctgggtattcaattactacaaaaattactccagccgtagaatatctaatggataaactgaatctaacaaagagcgacgtacaactgttgtaaattattttatgcttcgtaaaatgtaggttttgaaccaaacattctttcaaagaatgagatgcataaaactttattatccaatagattgactatttcggacgtcaatcgtttaaagtaaacttcgtaaaatattctttgatcactgccgagtttaaaacttctatcgataattgtctcatatgttttaatatttacaagttttttggtccatggtacattagccggacaaatatatgcaaaataatatcgttctccaagttctatagtttctggattatttttattatattcagtaactaaatacatattagggttatctgcggatttataatttgagtgatgcattctactcaacataaataattctagaggagacgatctactatcaaattcggatcgtaaatctgtttctaaagaacggagaatatctatacatacctgattagaattcatccgtccttcagacaacatctcagacagtctggttttgtacatcttaatcatattcttatgaaacttggaaacatctcttctagtttcactagtacctttattaattctctcaggtacagattttgaattcgacgatgctgagtatttcatcgttgtatatttcttcttcgattgcataatcagattcttatataccgcctcaaactctattttaaaattattaaacaatactctattattaatcagtcgttctaactctttcgctatttctatagacttatctacatcttgactgtctatctctgtaaacacggagtcggtatctccatacacgctacgaaaacgaaatctgtaatctataggcaacgatgttttcacaatcggattaatatctctatcgtccatataaaatggattacttaatggattggcaaaccgtaacataccgttagataactctgctccatttagtaccgattctagatacaagatcattctacgtcctatggatgtgcaactcttagccgaagcgtatgagtatagagcactatttctaaatcccatcagaccatatactgagttggctactatcttgtacgtatattgcatggaatcatagatggccttttcagttgaactggtagcctgttttagcatctttttatatctggctctctctgccaaaaatgttcttaatagtctaggaatggttccttctatcgatctatcgaaaattgctatttcagagatgaggttcggtagtctaggttcacaatgaaccgtaatatatctaggaggtggatatttctgaagcaatagctgattatttatttcttcttccaatctattggtactaacaacgacaccgactaatgtttccggagatagatttccaaagatacacacattaggatacagactgttataatcaaagattaatacattattactaaacattttttgttttggagcaaataccttaccgccttcataaggaaacttttgttttgtttctgatctaactaagatagttttagtttccaacaatagctttaacagtggacccttgatgactgtactcgctctatattcgaataccatggattgaggaagcacatatgttgacgcacccgcgtctgtttttgtttctactccataatactcccacaaatactgacacaaacaagcatcatgaatacagtatctagccatatctaaagctatgtttagattataatccttatacatctgagctaaatcaacgtcatcctttccgaaagataatttatatgtatcattaggtaaagtaggacataatagtacgactttaaatccattttcccaaatatctttacgaattactttacatataatatcctcatcaacagtcacataattacctgtggttaaaacctttgcaaatgcagcggctttgcctttcgcgtctgtagtatcgtcaccgatgaacgtcatttctctaactcctctatttaatactttacccatgcaactgaacgcgttcttggatatagaatccaatttgtacgaatccaatttttcaaatttttgaatgaatgaatatagatcgaaaaatatagttccattattgttattaacgtgaaacgtagtattggccatgccgcctactcccttatgactagactgatttctctcataaatacagagatgtacagcttcctttttgtccggagatctaaagataattttctctcctgttaataactctagacgattagtaatatatctcagatcaaagttatgtccgttaaaggtaacgacgtagtcgaacgttagttccaacaattgtttagctattcgtaacaaaactatttcagaacatagaactagttctcgttcgtaatccatttccattagtgactgtatcctcaaacatcctctatcgacggcttcttgtatttcctgttccgttaacatctcttcattaatgagcgtaaacaataatcgtttaccacttaaatcgatataacagtaacttgtatgcgagattgggttaataaatacagaaggaaacttcttatcgaagtgacactctatatctagaaataagtacgatcttgggatatcgaatctaggtatttttttagcgaaacagttacgtggatcgtcacaatgataacatccattgttaatctttgtcaaatattgctcgtccaacgagtaacatccgtctggagatatcccgttagaaatataaaaccaactaatattgagaaattcatccatggtggcattttgtatgctgcgtttctttggctcttctatcaaccacatatctgcgacggagcattttctatctttaatatctagattataacttattgtctcgtcaatgtctatagttctcatctttcccaacggcctcgcattaaatggaggaggagacaatgactgatatatttcgtccgtcactacgtaataaaagtaatgaggaaatcgtataaatacggtctcgccatttcgacatctggatttcagatataaaaatctgttttcaccgtgactttcaaaccaattaatgcaccgaacatccatttatagaatttagaaatatattttcatttaaatgaatcccaaacattggggaagagccgtatggaccattatttttatagtactttcgcaagcgggtttagacggcaacatagaagcgtgtaaacgaaaactatatactatagttagcactcttccatgtcctgcatgtagacggcacgcgactatcgctatagaggacaataatgtcatgtctagcgatgatctgaattatatttattattttttcatcagattatttaacaatttggcatctgatcccaaatacgcgatcgatgtgacaaaggttaaccctttataaacttaacccattataaaacttatgattagtcacaactgaaataaccgcgtgattattttttggtataattctacacggcatggtttctgtgactatgaattcaacccccgttacattagtgaaatctttaacaaacagcaagggttcgtcaaagacataaaactcattgtttacaatcgaaatagaccccctatcacacttaaaataaaaaatatccttatcctttaccaccaaataaaattctgattggtcaatgtgaatgtattcacttaacagttccacaaatttatttattaactccgaggcacatacatcgtcggtattttttatggcaaactttactcttccagcatccgtttctaaaaaaatattaacgagttccatttatatcatccaatattattgaaatgacgttgatggacagatgatacaaataagaaggtacggtacctttgtccaccatctcctccaattcatgctctattttgtcattaactttaatgtatgaaaacagtacgccacatgcttccatgacagtgtgtaacactttggatacaaaatgtttgacattagtataattgtccaagactgtcaatctataatagatagtagctataatatattctatgatggtattgaagaagatgacaaccttggcatattgatcatttaacacagacatggtatcaacagatagcttgaatgaaagagaatcagtaattggaataagcgtcttctcgatagagtgtccgtataccaacatgtctgatattttgatgtattccattaaattatttagttttttctttttattctcgttaaacagcatttctgtcaacggaccccaacatcgttgaccgattaagttttgattgatttttccgtgtaaggcgtatctagtcagatcgtatagcctatccaataatccatcgtctgtgtgtagatcacatcgtacactttttaattctctatagaagagcgacagacatctggagcaattacagacagcaatttctttattctctacagatgtaagatacttgaagacattcctatgatgatgcagaattttggataacacggtattgatggtatctgttaccataattcctttgatggctgatagtgtcagagcacaagatttccaatctttgacaatttttagcaccattatctttgttttgatatctatatcagacagcatggtgcgtctgacaacacagggattaagacggaaagatgaaatgattctctcaacatcttcaatagataccttgctattttttctggcattatctatatgtgcgagaatatcctctagagaatcagtatcctttttgatgatagtggatctcaatgacatgggacgtttaaaccttcttattctatcaccagattgcatggtgatttgtcttctttcttttatcataatgtaatctctaaattcatcggcaaattgtctatatctaaaatcataatatgagatgtttacctctacaaatatctgttcgtccaatgttagagtatttacatcagttttgtattccaaattaaacatggcaacggatttaattttatattcctctattaagtcctcgtcgataataacagaatgtagataatcatttaatccgtcgtacatggttggaagatgcttgttgacaaaatctttaattgtcttgatgaaggtgggactatatctaacatcttgattaataaaatttataacattgtccataggatactttgtaactagttttatacacatctcttcatcggtaagtttagacagaatatcgtgaacaggtggtatattatattcatcagatatacgaagaacaatgtccaaatctatattgtttaatatattatatagatgtagcgtagctcctacaggaatatctttaactaagtcaatgatttcatcaaccgttagatctattttaaagttaatcatataggcattgatttttaaaaggtatgtagccttgactacattctcattaattaaccattccaagtcattgtgtgtaagaagattatattctatcataagcttgactacatttggtcccgataccattaaagaattcttatgatataaggaaacagattttaggtactcatctactctacaagaattttggagagccttaacgatatcagtgacgtttattatttcaggaggaaagaatctaacattgagaatatcggaattaatagcttccagatacagtgattttggcaatagtccgtgtaatccataatccagtaacacgagctggtgcttgctagacaccttttcaatgtttaatttttttgaaataagctttgataaagccttcctcgcaaattccggatacatgaacatgtcggcgacatgattaagtattgttttttcattatttttatattttctcaacaagttctcaataccccaatagatgatagaatatcacccaatgcgtccatgttgtctatttccaacaggtcgctatatccaccaatagaagtttttccaaaaaagattctaggaacagttctaccaccagtaatttgttcaaaataatcccgcaattcattttcgggtttaaattctttaatatcgacaatttcatacgctcctcttttgaaactaaacttatttagaatatccagtgcatttctacaaaaaggacatgtatacttgacaaaaattgtcactttgttattggccaacctttgttgtacaaattcctcggccattttaatatttaagtgatataaaactatctcgacttatttaactctttagtcgagatatatggacgcagatagctatatgatagccaactacagaaggcaaacgctataaaaaacataattacgacgagcatatttataaatatttttattcagcattacttgatatagtaatattaggcacagtcaaacattcaaccactctcgatacattaactctctcattttctttaacaaattctgcaatatcttcgtaaaaagattcttgaaactttttagaatatctatcgactctagatgaaatagcgttcgtcaacatactatgttttgtatacataaaggcgcccattttaacagtttctagtgacaaaatgctagcgatcctaggatcctttagaatcacatagattgacgattcgtctctcttagtaactctagtaaaataatcatacaatctagtacgcgaaataatattatccttgacttgaggagatctaaacaatctagttttgagaacatcgataagttcatcgggaatgacatacatactatctttaatagaactcttttcatccagttgaatggattcgtccttaaccaactgattaatgagatcttctattttatcattttccagatgatatgtatgtccattaaagttaaattgtgtagcgcttctttttagtctagcagccaatactttaacatcactaatatcgatatacaaaggagatgatttatctatggcattaagaattcgtttttcgacatccgtcaaaaccaattcctttttgcctgtatcatccagttttccatcctttgtaaagaaattattttctactagactattaataagactgataaggattcctccataattgcacaatccaaactttttaacaaaactagactttacgagatctacaggaatgcgtacttcaggttttttagcttgtgattttttcttttgcggacattttctagtaaccaactcatctaccatttcattgattttagcagtgaaataagctttcaatgcacgggcactgatactattgaaaacgagttgatcttcaaattccgccatttaagttcaccaaacaacttttaaatacaaatatatcaatagtagtagaataagaactataaaaaaaataataattaaccaaccccaacaaccggtattattagttgatgtggtagttttctcatcacttagaacagatttaacaatttctataaagtctgtcaaatcatcttccggagaccccataaatacaccaaatatagcggcgtacaacttatccatttatacattgaatattggcttttctttatcgctatcttcatcatattcatcatcaatatcaacaagtcccagattacgagccagatcttcttctacattttcagtcattgatacacgttcactatctccagagagtccgataacgttagccaccacttctctatcaatgattagtttcttgagcgcgaaagtaatttttgtttccgttccggatctatagaagacgataggtgtgataattgccttggccaattgtctttctcttttactgagtgattctagttcaccttctatagatctgagaatggatgattctccagtcgaaacatattctaccatggatccgtttaatttgttgatgaagatggattcatccttaaatgttttctctgtaatagtttccaccgaaagactatgcaaagaatttggaatgcgttccttgtgcttaatgtttccatagacggcttctagaagttgatacaacataggactagccgcggtaacttttatttttagaaagtatccatcgcttctatcttgtttagatttatttttataaagtttagtctctccttccaacataataaaagtggaagtcatttgactagataaactatcagtaagttttatagagatagacgaacaattagcgtattgagaagcatttagtgtaacgtattcgatacattttgcattagatttactaatcgattttgcatactctataacacccgcacaagtctgtagagaatcgctagatgcagtaggtcttggtgaagtttcaactctcttcttgattaccttactcatgattaaacctaaataattgtactttgtaatataatgatatatattttcactttatctcatttgagaataaaaatgtttttgtttaaccactgcatgatgtacagatttcggaatcgcaaaccaccagtggttttattttatccttgtccaatgtgaattgaatgggagcggatgcgggtttcgtacgtagatagtacattcccgtttttagaccgagactccatccgtaaaaatgcatactcgttagtttggaataactcggatctgctatatggatattcatagattgactttgatcgatgaaggctcccctgtctgcagccatttttatgatcgtcttttgtggaatttcccaaatagttttataaactcgcttaatatcttctggaaggtttgtattctgaatggatccaccatctgccataatcctattcttgatctcatcattccataattttctctcggttaaaactctaaggagatgcggattaactacttgaaattctccagacaatactctccgagtgtaaatattactggtatacggttccaccgactcattatttcccaaaatttgagcagttgatgcagtcggcataggtgccaccaataaactatttctaagaccgtatgttctgattttatcttttagaggttcccaattccaaagatccgacggtacaacattccaaagatcatattgtagaataccgttactggcgtacgatcctacatatgtatcgtatggtccttccttctcagctagttcacaactcgcctctaatgcaccgtaataaatggtttcgaagatcttcttatttagatcttgtgcttccaggctatcaaatggataatttaagagaataaacgcgtccgctaatccttgaacaccaataccgataggtctatgtctcttattagagatttcagcttctggaataggataataattaatatctataattttattgagatttctgacaattactttgaccacatccttcagtttgagaaaatcaaatcgcccatctattacaaacatgttcaaggcaacagatgccagattacaaacggctacctcattagcatccgcatattgtattatctcagtgcaaagattactacacttgatagttcctaaattttgttgattactctttttgttacacgcatccttataaagaatgaatggagtaccagtttcaatctgagattctataatcgctttccagacgactcgagcctttattatagatttgtatctcctttctctttcgtatagtgtatacaatcgttcgaactcgtctccccaaacattgtccaatccaggacattcatccggacacatcaacgaccactctccgtcatccttcactcgtttcataaagagatcaggaatccaaagagctataaatagatctctggttctatgttcctcgtttcctgtattctttttaagatcgaggaacgccataatatcagaatgccacggttccaagtatatggccataactccaggccgtttgtttcctccctgatctatgtatctagcggtgttattataaactctcaacattggaataataccgtttgatataccattggtaccggagatatagcttccactggcacgaatattactaattgatagacctattccccctgccattttagagattaatgcgcatcgttttaacgtgtcatagataccctctatgctatcatcgatcatgttaagtagaaaacagctagacatttggtgacgactagttcccgcattaaataaggtaggagaagcgtgcgtaaaccatttttcagaaagtagattgtacgtctcaatagctgagtctatatcccattgatgaattcctactgcgacacgcattaacatgtgctgaggtctttcaacgatcttgttgtttattttcaacaagtaggatttttccaaagttttaaaaccaaaatagttgtatgaaaagtctcgttcgtaaataataaccgagttgagtttatccttatatttgttaactatatccatggtgatacttgaaataatcggagaatgtttcccatttttaggattaacatagttgaataaatcctccatcacttcactaaatagtttttttgtttccttgtgtagatttgatacggctattctggcggctagaatggcataatccggatgttgtgtagtacaagtggctgctatttcggctgccagagtgtccaattctaccgttgttactccattatatattccttgaataaccttcatagctattttaataggatctatatgatccgtgtttaagccataacataattttctaatacgagacgtgattttatcaaacatgacattttccttgtatccatttcgtttaatgacaaacatttttgttggtgtaataaaaaaattatttaacttttcattaatagggatttgacgtatgtagcgtacaaaatgattgttcctggtatatagataaagagtcctatatatttgaaaatcgttacggctcgattaaactttaatgattgcatagtgaatatatcattaggatttaactccttgactatcatggcggcgccagaaattaccatcaaaagcattaatacagttataccgatcgcagttagaacggttatagcatccaccatttatatctaaaaattagatcaaagaatatgtgacaaagtcctagttgtatactgagaattgacgaaacaatgtttcttacatatttttttcttattagtaaccgacttaatagtaggaactggaaaactagacttgattattctataagtatagatacccttccaaataatattctctttgataaaagttccagaaaatgtagaattttttaaaaagttatcttttgctattaccaagattgtgtttagacgcttattattaatatgagtgatgaaatccacaccgcctctagatatcgcctttatttccacattagatggtaaatccaatagtgaaactatctttttaggaatgtatggactcgcgtttagaggagtaaacgtcttaggcgtcggaaaggatgattcatcaaacgaataaacaatttcacaaatggatgttaatgtattagtaggaaattttttgacgctattggaattgaagattctaatggatgatgttctacctatttcatccgataacatgttaatttccgacaccaacggttttaatatttcgatgatatacggtagtctctctttcggacttatatagcttattccacaatacgagtcattatatactccaaaaaacaaaataactagtataaaatctgtatcgaatgggaaaaacgaaattatcgacataggtatagaatccggaacattgaacgtattaatacttaattctttttctgtggtaagtaccgataggttattgacattgtatggttttaaatattctataacttgagacttgatagatattagtgatgaattgaaaattatttttatcaccacgtgtgtttcaggatcatcgtcgacgcccgtcaaccaaccgaacggagtaaaataaatatcattaatatatgctctagatattagtatttttatcaatcctttgattatcatcttctcgtaggcgaatgattccatgatcaagagtgatttaagaacatcctccggagtattaatgggcttagtaaacagtccatcgttgcaataataaaagttatccaagttaaaggatattatgcattcgtttaaagatatcacctcatctgacggagacaattttttggtaggttttagagactttgaagctacttgtttaacaaagttattcatcgtcgtctactattctatttaattttgtagttaatttatcacatatcacattaattgactttttggtccacttttccatacgtttatattcttttaatcctgcgttatccgtttccgttatatccagggatagatcttgcaagttaaatagaatgctcttaaataatgtcattttcttatccgctaaaaatttaaagaatgtataaacctttttcagagatttgaaactcttaggtggtgtcctagtacacaatatcataaacaaactaataaacattccacattcagattccaacagctgattaacttccacattaatacagcctattttcgctccaaatgtacattcgaaaaatctgaataaaacatcgatgtcacaatttgtattatccaatacagaatgtttgtgattcgtgttaaaaccatcggagaaggaatagaaataaaaattattatagtggtggaattcagttggaatattgcctccggagtcataaaaggatactaaacattgttttttatcataaattacacatttccaatgagacaaataacaaaatccaaacattacaaatctagaggtagaacttttaattttgtctttaagtatatacgataagatatgtttattcataaacgcgtcaaatttttcatgaatcgctaaggagtttaagaatctcatgtcaaattgtcctatataatccacttcggatccataagcaaactgagagactaagttcttaatacttcgattgctcatccaggctcctctctcaggctctattttcatcttgacgacctttggattttcaccagtatgtattcctttacgtgataaatcatcgattttcaaatccatttgtgagaagtctatcgccttagatactttttcccgtagtcgaggtttaaaaaaatacgctaacggtatactagtaggtaactcaaagacatcatatatagaatggtaacgcgtctttaactcgtcggttaactctttcttttgatcgagttcgtcgctactattgggtctgctcaggtgccccgactctactagttccaacatcataccgataggaatacaagacactttgccggcggttgtagatttatcatatttttccactacatatccgttacaatttgttaaaaatttagatacatctatattgctacataatccagctagtgaatatatatgacataataaattggtaaatcctagttctggtattttactaattactaaatctgtatatctttccatttatcatggaaaagaatttaccagatatcttcttttttccaaactgcgttaatgtattctcttacaaatattcacaagatgaattcagtaatatgagtaaaacggaacgtgatagtttctcattggccgtgtttccagttataaaacatagatggcataacgcacacgttgtaaaacataaaggaatatacaaagttagtacagaagcacgtggaaaaaaagtatctcctccatcactaggaaaacccgcacacataaacctaaccgcgaagcaatatatatacagtgaacacacaataagctttgaatgttatagttttctaaaatgtataacaaatacagaaatcaattcgttcgatgagtatatattaagaggactattagaagctggtaatagtttacagatattttccaattccgtaggtaaacgaacagatactataggtgtactagggaataagtatccatttagcaaaattccattggcctcattaactcctaaagcacaacgagagatattttcagcgtggatttctcatagacctgtagttttaactggaggaactggagtgggtaagacgtcacaggtacccaagttattgctttggtttaattatttatttggtggattctctactctagataaaatcactgactttcacgaaagaccagtcattctatctcttcctaggatagctttagttagattgcatagcaataccattttaaaatcattgggatttaaggtactagatggatctcctatttctttacggtacggatctataccggaagaattaataaacaaacaaccaaaaaaatatggaattgtattttctacccataagttatctctaacaaaactatttagttatggcactcttattatagacgaagttcatgagcatgatcaaataggagatattattatagcagtagcgagaaagcatcatacgaaaatagattctatgtttttaatgactgccacgttagaggatgacagggaacggctaaaagtatttttacctaatcccgcatttatacatattcctggagatacactgtttaaaattagcgaggtatttattcataataagataaatccatcttccagaatggcatacatagaagaagaaaagagaaatttagttactgctatacagatgtatactcctcctgatggatcatccggtatagtctttgtggcatccgttgcacagtgtcacgaatataaatcatatttagaaaaaagattaccgtatgatatgtatattattcatggtaaggtcttagatatagacgaaatattagaaaaagtgtattcatcacctaatgtatcgataattatttctactccttatttggaatccagcgttactatacgcaatgttacacacatttatgatatgggtagagtttttgtccccgctccttttggaggatcgcaacaatttatttctaaatctatgagagatcaacgaaaaggaagagtaggaagagttaatcctggtacatacgtctatttctatgatctgtcttatatgaagtctatacagcgaatagattcagaatttctacataattatatattgtacgctaataagtttaatctaacactccccgaagatttgtttataatccctacaaatttggatattctatggcgtacaaaggaatatatagactcgttcgatattagtacagaaacatggaataaattattatccaattattatatgaagatgatagagtatgctaaactttatgtactaagtcctattctcgctgaggagttggataactttgagaggacgggagaattaactagtattgtacgagaagccattttatctctaaatttacaaattaagattttaaattttaaacataaagatgatgatacgtatatacacttttgtaaaatattattcggtgtctataacggaacaaacgctactatatattatcatagacctctaacgggatatatgaatatgatttcagatactatatttgttcctgtagataataactaaaaatcaaactctaatgaccacatctttttttagagatgaaaaattttccacatctccttttgtagacacgactaaacattttgcagaaaaaagtttattagtgtttagataatcgtatacttcatcagtgtagatagtaaatgtgaacagataaaaggtattcttgctcaatagattggtaaattccatagaatatattaatcctttcttcttgagatcccacatcatttcaaccagagacgttttatccaatgatttacctcgtactataccacatacaaaactagattttgcagtgacgtcgtacctggtattcctaccaaacaaaattttacttttagttcttttagaaaattctaaggtagaatctctatttgccaatatgtcatctatggaattaccactagcaaaaaatgatagaaatatatattgatacatcgcagctggttttgatctactatactttaaaaacgaatcagattccataattgcctgtatatcatcagctgaaaaactatgttttacacgtattccttcggcatttctttttaatgatatatcttgtttagacaatgataaagttatcatgtccatgagagacgcgtctccgtatcgtataaatatttcattagatgttagacgcttcattaggggtatacttctataaggtttcttaatcagtccatcattggttgcgtcaagaactactatcggatgttgttgggtatctctagtgttacacatggccttactaaagtttgggtaaataactatgatatctctattaattatagatgcatatatttcattcgtcaaggatattagtatcgacttgctatcgtcattaatacgtgtaatgtaatcatataaatcatgcgatagccaaggaaaatttaaatagatgttcatcatataatcgtcgctataattcatattaatacgttgacattgactaatttgtaatatagcctcgccacgaagaaagctctcgtattcagtttcatcgataaaggataccgttaaatataactggttgccgatagtctcatagtctattaagtggtaagtttcgtacaaatacagaatccctaaaatattatctaatgttggattaatctttaccataactgtataaaatggagacggagtcataactattttaccgtttgtacttactggaatagatgaaggaataatctccggacatgctggtaaagacccaaatgtctgtttgaagaaatccaatgttccaggtcctaatctcttaacaaaaattacgatattcgatcccgatatcctttgcattctatttaccagcatatcacgaactatattaagattatctatcatgtctattctcccaccgttatataaatcgcctccgctaagaaacgttagtatatccatacaatggaatacttcatttctaaaatagtattcgttttctaattctttaatgtgaaatcgtatactagaaagggaaaaattatctttgagttttccgttagaaaagaaccacgaaactaatgttctgattgcgtccgattccgttgctgaattaatggatttacaccaaaaactcatataacttctagatgtagaagcattcgctaaaaaattagtagaatcaaaggatataagtagatgttccaacaagtgagcaattcccaagatttcatctatatcattctcgaatccgaaattagaaattcccaagtagatatcctttttcatccgatcgttgatgaaaatacgaactttattcggtaagacaatcatttactaaggagtaaaataggaagtaatgttcgtatgtcgttatcatcgtataaattaaaggtgtgttttttaccattaagtgacattataattttaccaatattggaattataatataggtgtatttgcgcactcgcgacggttgatgcatcggtaaatatagctgtatctaatgttctagtcggtatttcatcatttcgctgtctaataatagcgttttctctatctgtttccattacagctgcctgaagtttattggtcggataatatgtaaaataataagaaatacatacgaataacaaaaataaaataagatataataaagatgccatttagagatctaattttgtttaacttgtccaaattcctacttacagaagatgaggaatcgttggagatagtgtcttccttatgtagaggatttgaaatatcttataatgacttgataacttactttccagataggaaataccataaatatatttataaagtatttgaacatgtagatttatcggaggaattaagtatggaattccatgatacaactctgagagatttagtctatcttagattgtacaagtattccaagtgtatacggccgtgttataaattaggagataatctaaaaggcatagttgttataaaggacaggaatatttatattagggaagcaaatgatgacttgatagaatatctcctcaaggaatacactcctcagatttatacatattctaatgagcgcgtccccataactggttcaaaattaattctttgtggattttctcaagttacatttatggcgtatacaacgtcgcatataacaacaaataaaaaggtagatgttctcgtttccaaaaaatgtatagatgaactagtcgatccaataaattatcaaatacttcaaaatttatttgataaaggaagcggaacaataaacaaaatactcaggaagatattttattcggtaacaggtggccaaactccataggtagctttttctatttcggattttagaatttccaaattcaccagcgatttatcggttttggtgaaatccaaggatttattaatgtccacaaatgccatttgttttgtctgtggattgtatttgaaaatggaaacgatgtagttagatagatgcgctgcgaagtttcctattagggttccgcgcttcacgtcacccagcatacttgaatcaccatcctttaaaaaaaatgataagatatcaacatggagtatatcatactcgaattttaattcttctactgactcactgacattttcacaaatactacaatacggtttaccgaaaataatcagtacgttcttcatttatgggtatcaaaaacttaaaatcgttactgctggaaaataaatcactgacgatattagatgataatttatacaaagtatacaatggaatatttgtggatacaatgagtatttatatagccgtcgccaattgtgtcagaaacttagaagagttaactacggtattcataaaatacgtaaacggatgggtaaaaaagggagggcatgtaaccctttttatcgatagaggaagtataaaaattaaacaagacgttagagacaagagacgtaaatattctaaattaaccaaggacagaaaaatgttagaattagaaaagtgtacatccgaaatacaaaatgttaccggatttatggaagaagaaataaaggcagaaatgcaattaaaaatcgataaactcacatttcaaatatatttatctgattctgataacataaaaatatcattgaatgagatactaacacatttcaacaataatgagaatgttacattattttattgtgatgaacgagacgcagaattcgttatgtgtctcgaggctaaaacacatttctctaccacaggagaatggccgttgataataagtaccgatcaggatactatgctatttgcatctgctgataatcatcctaagatgataaaaaacttaactcaactgtttaaatttgttccctcggcagaggataactatttagcaaaattaacggcgttagtgaatggatgtgatttctttcctggactctatggggcatctataacacccaccaacttaaacaaaatacaattgtttagtgattttacaatcgataatatagtcactagtttggcaattaaaaattattatagaaagactaactctaccgtagacgtgcgtaatattgttacgtttataaacgattacgctaatttagacgatgtctactcgtatattcctccttgtcaatgcactgttcaagaatttatattttccgcattagatgaaaaatggaatgaatttaaatcatcttatttagaaagcgtgccgttaccctgccaattaatgtacgcgttagaaccacgcaaggagattgatgtttcagaagttaaaactttatcatcttatatagatttcgaaaatactaaatcagatatcgatgttataaaatctatatcctcgatcttcggatattctaacgaaaactgtaacacgatagtattcggcatctataaggataatttactactgagtataaataattcattttactttaacgatagtctgttaataaccaatactaaaagtgataatataataaatataggttactagattaaaaatggtgttccaactcgtgtgctctacatgcggtaaagatatttctcacgaacgatataaattgattatacgaaaaaaatcattaaaggatgtactcgtcagtgtaaagaacgaatgttgtaggttaaaattatctacacaaatagaacctcaacgtaacttaacagtgcaacctctattggatataaactaatatggatccggttaattttatcaagacatatgcgcctagaggttctattatttttattaattataccatgtcattaacaagtcatttgaatccatcgatagaaaaacatgtgggtatttattatggtacgttattatcggaacacttggtagttgaatctacctatagaaaaggagttcgaatagtcccattggatagtttttttgaaggatatcttagtgcaaaagtatacatgttagagaatattcaagttatgaaaatagcagctgatacgtcattaactttattgggtattccgtatggatttggtcatgatagaatgtattgttttaaattggtagctgactgttataaaaatgccggtattgatacatcgtctaaacgaatattgggcaaagatatttttctgagccaaaacttcacagacgataatagatggataaagatatatgattctaataatttaacattttggcaaattgattaccttaaagggtgagttaatatgcataactactcctccgttgttttttccctcgttctttttcttaacgttgtttgccatcactctcataatgtaaagatattctaaaatggtaaacttttgcatatcggacgcagaaattggtataaatgttgtaattgtattatttcccgtcaatggactagtcacagctccatcagttttatatcctttagagtatttctcactcgtgtctaacattctagagcattccatgatctgtttatcgttgatattggccggaaagatagattttttattttttattatattactattggcaattgtagatataacttctggtaaatatttttctaccttttcaatctcttctattttcaagccggctatatattctgctatattgttgctagtatcaataccttttctggctaagaagtcatatgtggtattcactatatcagttttaactggtagttccattagcctttccacttctgcagaataatcagaaattggttctttaccagaaaatccagctactataataggctcaccgatgatcattggcaaaatcctatattgtaccagattaatgagagcatatttcatttccaataattctgctagttcttgagacattgatttatttgatgaatctagttggttctctagatactctaccatttctgccgcatacaataacttgttagataaaatcagggttatcaaagtgtttagcgtggctagaatagtgggcttgcatgtattaaagaatgcggtagtatgagtaaaccgttttaacgaattatatagtctccagaaatctgtggcgttacatacatgagccgaatgacatcgaagattgtccaatatttttaatagctgctctttgtccattatttctatatttgactcgcaacaattgtagataccattaatcaccgattcctttttcgatgccggacaatagcacaattgtttagctttggactctatgtattcagaattaatagatatatctctcaatacagattgcactatacattttgaaactatgtcaaaaattgtagaacgacgctgttctgcagccatttaactttaaataatttacaaaaatttaaaatgagcatccgtataaaaatcgataaactgcgccaaattgtggcatatttttcagagttcagtgaagaagtgtctataaatgtagactcgacggatgagttaatgtatatttttgccgccttgggcggatctgtaaacatttgggcaattatacctctaagtgcatcagtgttttaccgaggagccgaaaatattgtgtttaatcttcctgtgtccaaggtaaaatcgtgtttgtgtagttttcacaatgatgccatcatagatatagaacctgatctggaaaataatctagtaaaactttctagttatcatgtagtaagtgtcgattgtaacaaggaactgatgcctattaggacagatactactatttgtctaagtatagatcaaaagaaatcttacgtgtttaattttcacaagtatgaagaaaaatgttgtggtagaaccgtcattcatctagaatggttgttgggctttatcaagtgtattagtcagcatcagcatctggctattatgtttaaagatgacaatattattatgaagactcctggtaatactgatgcgttttccagggaatattctatgactgaatgttctcaagaactacaaaagttttctttcaaaatagctatctcgtctctcaacaaactacgaggattcaaaaagagagtcaatgtttttgaaactagaatcgtaatggataatgacgataacattttaggaatgttgttttcggatagagttcaatcctttaagatcaacatctttatggcgtttttagattaatactttcaatgagataaatatgggtggcggagtaagtgttgagctccctaaacgggatccgcctccgggagtacccactgatgagatgttattaaacgtggataaaatgcatgacgtgatagctcccgctaagcttttagaatatgtgcatataggaccactagcaaaagataaagaggataaagtaaagaaaagatatccagagtttagattagtcaacacaggacccggtggtctttcggcattgttaagacaatcgtataatggaaccgcacccaattgctgtcgcacttttaatcgtactcattattggaagaaggatggaaagatatcagataagtatgaagagggtgcagtattagaatcgtgttggccagacgttcacgacactggaaaatgcgatgttgatttattcgactggtgtcagggggatacgttcgatagaaacatatgccatcagtggatcggttcagcctttaataggagtaatagaactgtagagggtcaacaatcgttaataaatctgtataataagatgcaaacattatgtagtaaagatgctagtgtaccaatatgcgaatcatttttgcattatttacgcgcacacaatacagaagatagcaaagagatgatcgattatattctaagacaacagtctgcggactttaaacagaaatatatgagatgtagttatcccactagagataagttagaagagtcattaaaatatgcggaacctcgagaatgttgggatccagagtgttcgaatgccaatgttaatttcttactaacacgtaattataataatttaggactttgcaatattgtacgatgtaataccagcgtgaacaacttacagatggataaaacttcctcattaagattgtcatgtggattaagcaatagtgatagattttctactgttcccgtcaatagagcaaaagtagttcaacataatattaaacactcgttcgacctaaaattgcatttgatcagtttattatctctcttggtaatatggatactaattgtagctatttaaatgggtgccgcggcaagcatacagacgacggtgaatacactcagcgaacgtatctcgtctaaattagaacaagaagcgaacgctagtgctcaaacaaaatgtgatatagaaatcggaaatttttatatccgacaaaaccatggatgtaacctcactgttaaaaatatgtgctctgcggacgcggatgctcagttggatgctgtgttatcagccgctacagaaacatatagtggattaacaccggaacaaaaagcatacgtgccagctatgtttactgctgcgttaaacattcagacgagtgtaaacactgttgttagagattttgaaaattatgtgaaacagacttgtaattctagcgcggtcgtcgataacaaattaaagatacaaaacgtaatcatagatgaatgttacggagccccaggatctccaacaaatttggaatttattaatacaggatctagcaaaggaaattgtgccattaaagcgttgatgcaattgacgactaaggccactactcaaatagcacctagacaagttgctggtacaggagttcagttttatatgattgttatcggtgttataatattggcagcgttgtttatgtactatgccaagcgtatgttgttcacatccaccaatgataaaatcaaacttattttagccaataaggaaaacgtccattggactacttacatggacacattctttagaacttctccgatggttattgctaccacggatatgcaaaactgaaaatatattgataatattttaatagattaacatggaagttatcgctgatcgtctagacgatatagtgaaacaaaatatagcggatgaaaaatttgtagattttgttatacacggtctagagcatcaatgtcctgctatacttcgaccattaattaggttgtttattgatatactattatttgttatagtaatttatatttttacggtacgtctagtaagtagaaattatcaaatgttgttggtggtgctagtcatcacattaactattttttattactttatactataatagtactagactgacttctaacaaacatctcacctgccataaataaatgcttgatattaaagtcttctatttctaacactattccatctgtggaaaataatactctgacattatcgctaattgacacatcggtgagtgatatgcctataaagtaataatcttctttgggcacatataccagtgtaccaggttctaacaacctatttactggtgctcctgtagcatactttttctttaccttgagaatatccatcgtttgcttggtcaatagcgatatgtgattttttatcaaccactcaaaaaagtaattggagtgttcatatcctctacgggctattgtctcatggccgtgtatgaaatttaagtaacacgactgtggtagatttgttctatagagccgattgccgcaaatagatagaactaccaatatgtctgtacaaatgttaaacattaattgattaacagaaaaaacaatgttcgttctgggaatagaaaccagatcaaaacaaaattcgttagaatatatgccacgtttatacatggaatataaaataactacagtttgaaaaataacagtatcatttaaacatttaacttgcggggttaatctcacaactttactgtttttgaactgttcaaaatatagcatcgatccgtgagaaatacgtttagccgcctttaatagaggaaatcccaccgcctttctggatctcaccaacgacgatagttctgaccagcaactcatttcttcatcatccacctgttttaacatataataggcaggagatagatatccgtcattgcaatattccttctcgtaggcacacaatctaatattgataaaatctccattctcttctctgcatttattatcttgtctcggtggctgattaggctgtggtcttggtttaggccttggtctatcgttgttgaatctattttggtcattaaatctttcatttcttcctggtatatttctatcacctcgtttggttggatttttgtctatattatcgtttgtaacatcggtacgggtattcatttatcacaaaaaaaacttctctaaatgagtctactgctagaaaacctcatcgaagaagataccatattttttgcaggaagtatatctgagtatgatgatttacaaatggttattgccggcgcaaaatccaaatttccaagatctatgctttctatttttaatatagtacctagaacgatgtcaaaatatgagttggagttgattcataacgaaaatatcacaggagcaatgtttaccacaatgtataatataagaaacaatttgggtctaggagatgataaactaactattgaagccattgaaaactatttcttggatcctaacaatgaagttatgcctcttattattaataatacggatatgactgccgtcattcctaaaaaaagtggtaggagaaagaataagaacatggttatcttccgtcaaggatcatcacctatcttgtgcattttcgaaactcgtaaaaagattaatatttataaagaaaatatggaatccgcgtcgactgagtatacacctatcggagacaacaaggctttgatatctaaatatgcgggaattaatgtcctgaatgtgtattctccttccacatccataagattgaatgccatttacggattcaccaataaaaataaactagagaaacttagtactaataaggaactagaatcgtatagttctagccctcttcaagaacccattaggttaaatgattttctgggactattggaatgtgttaaaaagaatattcctctaacagatattccgacaaaggattgattactataaatggagaatgttcctaatgtatactttaatcctgtgtttatagagcccacgtttaaacattctttattaagtgtttataaacacagattaatagttttatttgaagtattcgttgtattcattctaatatatgtattttttagatctgaattaaatatgttcttcatgcctaaacgaaaaatacccgatcctattgatagattacgacgtgctaatctagcgtgtgaagacgataaattaatgatctatggattaccatggatgacaactcaaacatctgcgttatcaataaatagtaaaccgatagtgtataaagattgtgcaaagcttttgcgatcaataaatggatcacaaccagtatctcttaacgatgttcttcgcagatgatgattcattttttaagtatttggctagtcaagatgatgaatcttcattatctgatatattgcaaatcactcaatatctagactttctgttattattattgatccaatcaaaaaataaattagaagctgtgggtcattgttatgaatctctttcagaggaatacagacaattgacaaaattcacagactttcaagattttaaaaaactgtttaacaaggtccctattgttacagatggaagggtcaaacttaataaaggatatttgttcgactttgtgattagtttgatgcgattcaaaaaagaatcctctctagctaccaccgcaatagatcctgttagatacatagatcctcgtcgcaatatcgcattttctaacgtgatggatatattaaagtcgaataaagtgaacaataattaattctttattgtcatcatgaacggcggacatattcagttgataatcggccccatgttttcaggtaaaagtacagaattaattagacgagttagacgttatcaaatagctcaatataaatgcgtgactataaaatattctaacgataatagatacggaacgggactatggacgcatgataagaataattttgaagcattggaagcaactaaactatgtgatgtcttggaatcaattacagatttctccgtgataggtatcgatgaaggacagttctttccagacattgttgaattctgtgagcgtatggcaaacggtaccgagctcggatccttctgtgagcgtatggcaaacgaaggaaaaatagttatagtagccgcactcgatgggacatttcaacgtaaaccgtttaataatattttgaatcttattccattatctgaaatggtggtaaaactaactgctgtgtgtatgaaatgctttaaggaggcttccttttctaaacgattgggtgaggaaaccgagatagaaataataggaggtaatgatatgtatcaatcggtgtgtagaaagtgttacatcgactcataatattatattttttatctaaaaaactaaaaataaacattgattaaattttaatataatacttaaaaatggatgttgtgtcgttagataaaccgtttatgtattttgaggaaattgataatgagttagattacgaaccagaaagtgcaaatgaggtcgcaaaaaaactgccgtatcaaggacagttaaaactattactaggagaattattttttcttagtaagttacagcgacacggtatattagatggtgccaccgtagtgtatataggatctgctcccggtacacatatacgttatttgagagatcatttctataatttaggagtgatcatcaaatggatgctaattgacggccgccatcatgatcctattttaaatggattgcgtgatgtgactctagtgactcggttcgttgatgaggaatatctacgatccatcaaaaaacaactgcatccttctaagattattttaatttctgatgtgagatccaaacgaggaggaaatgaacctagtacggcggatttactaagtaattacgctctacaaaatgtcatgattagtattttaaaccccgtggcgtctagtcttaaatggagatgcccgtttccagatcaatggatcaaggacttttatatcccacacggtaataaaatgttacaaccttttgctccttcatattcagctgaaatgagattattaagtatttataccggtgagaacatgagactgactcgagttaccaaattagacgctgtaaattatgaaaaaaagatgtactaccttaataagatcgtccgtaacaaagtagttgttaactttgattatcctaatcaggaatatgactattttcacatgtactttatgctgaggaccgtgtactgcaataaaacatttcctactactaaagcaaaggtactatttctacaacaatctatatttcgtttcttaaatattccaacaacatcaactgaaaaagttagtcatgaaccaatacaacgtaaaatatctagcaaaaattctatgtctaaaaacagaaatagcaagagatccgtacgcggtaataaatagaaacgtactactgagatatactaccgatatagagtataatgatttagttactttaataaccgttagacataaaattgattctatgaaaactgtgtttcaggtatttaacgaatcatccataaattatactccggttgatgatgattatggagaaccaatcattataacatcgtatcttcaaaaaggtcataacaagtttcctgtaaattttctatacatagatgtggtaatatctgacttatttcctagctttgttagactagatactacagaaactaatatagttaatagtgtactacaaacaggcgatggtaaaaagactcttcgtcttcccaaaatgttagagacggaaatagttgtcaagattctctatcgccctaatataccattaaaaattgttagatttttccgcaataacatggtaactggagtagagatagccgatagatctgttatttcagtcgctgattaatcaattagtagagatgagataagaacattataataatcaataatatatcttatatcttatatcttatatcttatatcttgtttagaaaaatgctaatattaaaatagctaacgctagtaatccaatcggaagccatttgatatctataatagggtatctaatttcctgatttaaatagcggacagctatattctcggtagctactcgtttggaatcacaaacattatttacatctaatttactatctgtaatggaaacgtttcccaatgaaatggtacaatccgatacattgcattttgttatatttttttttaaagaggctggtaacaacgcatcgcttcgtttacatggctcgtaccaacaataatagggtaatcttgtatctattcctatccgtactatgcttttatcaggataaatacatttacatcgtatatcgtctttgttagcatcacagaatgcataaatttgttcgtccgtcatgataaaaatttaaagtgtaaatataactattatttttatagttgtaataaaaagggaaatttgattgtatactttcggttctttaaaagaaactgacttgataaaaatggctgtaatctctaaggttacgtatagtctatatgatcaaaaagagattaatgctacagatattatcattagtcatgttaaaaatgacgacgatatcggtaccgttaaagatggtagactaggtgctatggatggggcattatgtaagacttgtgggaaaacggaattggaatgtttcggtcactggggtaaagtaagtatttataaaactcatatagttaagcctgaatttatttcagaaattattcgtttactgaatcatatatgtattcactgcggattattgcgttcacgagaaccgtattccgacgatattaacctaaaagagttatcgggacacgctcttaggagattaaaggataaaatattatccaagaaaaagtcatgttggaacagtgaatgtatgcaaccgtatcaaaaaattactttttcaaagaaaaaggtttgtttcgtcaacaagttggatgatattaacgttcctaattctctcatctatcaaaagttaatttctattcatgaaaagttttggccattattagaaattcatcaatatccagctaacttattttatacagactactttcccatccctccgttgattattagaccggctattagtttttggatagatagtatacccaaagagaccaatgaattaacttacttattaggtatgatcgttaagaattgtaacttgaatgctgatgaacaggttatccagaaggcggtaatagaatacgatgatattaaaattatttctaataacactaccagtatcaatttatcatatattacatccggcaaaaataatatgattagaagttatatcgtcgcccgacgaaaagatcagaccgctagatctgtaattggtcccagtacatctatcaccgttaatgaggtaggaatgcccgcatatattagaaatacacttacagaaaagatatttgttaatgcctttacagtggataaagttaaacaactattagcgtcaaaccaagttaaattttactttaataaacgattaaaccaattaacaagaatacgccaaggaaagtttattaaaaataaaatacatttattgcctggtgattgggtagaagtagctgttcaagaatatacaagtattatttttggaagacagccgtctctacatagatacaacgtcatcgcttcatctatcagagctaccgaaggagatactatcaaaatatctcccggaattgccaactctcaaaatgctgatttcgacggggatgaggaatggatgatattagaacaaaatcctaaagctgtaattgaacaaagtattcttatgtatccgacgacgttactcaaacacgatattcatggagcccccgtttatggatctattcaagatgaaatcgtagcagcgtattcattgtttaggatacaagatctttgtttagatgaagtattgaacatcttggggaaatatggaagagagttcgatcctaaaggtaaatgtaaattcagcggtaaagatatctatacttacttgataggtgaaaagattaattatccgggtctcttaaaggatggtgaaattattgcaaacgacgtagatagtaattttgttgtggctatgaggcatctgtcattggctggactcttatccgatcataagtcgaacgtggaaggtatcaactttattatcaagtcatcttatgtttttaagagatatctatctatttacggttttggggtgacattcaaagatctgagaccaaattcgacgttcactaataaattggaggccatcaacgtagaaaaaatagaacttatcaaagaagcatacgccaaatatctcaacgatgtaagagacgggaaaatagttccattatctaaagctttagaggcggactatgtggaatccatgttatccaacttgacaaatcttaatatccgagagatagaagaacatatgagacaaacgctgatagatgatccagataataacctcctgaaaatggccaaagcgggttataaagtaaatcccacagaactaatgtatattctaggtacgtatggacaacaaaggattgatggtgaaccagcagagactcgagtattgggtagagttttaccttactatcttccagactctaaggatccagaaggaagaggttacattcttaattctttaacaaaaggattaacgggttctcaatattacttttcgatgctggttgccagatctcaatctactgatatcgtctgtgaaacatcacgtaccggaacactggctagaaaaatcattaaaaagatggaggatatggtggtcgacggatacggacaagtagttataggtaatacgctcatcaagtacgccgccaattataccaaaattctaggctcagtatgtaaacctgtagatcttatctatccagatgagtccatgacttggtatttggaaattagtgctctgtggaataaaataaaacagggattcgtttactctcagaaacagaaacttgcaaagaagacattggcgccgtttaatttcctagtattcgtcaaacccaccactgaggataatgctattaaggttaaggatctgtacgatatgattcataacgtcattgatgatgtgagagagaaatacttctttacggtatctaatatagattttatggagtatatattcttgacgcatcttaatccttctagaattagaattacaaaagaaacggctatcactatctttgaaaagttctatgaaaaactcaattatactctaggtggtggaactcctattggaattatttctgcacaggtattgtctgagaagtttacacaacaagccctgtccagttttcacactactgaaaaaagtggtgccgtcaaacaaaaacttggtttcaacgagtttaataacttgactaatttgagtaagaataagaccgaaattatcactctggtatccgatgatatctctaaacttcaatctgttaagattaatttcgaatttgtatgtttgggagaattaaatccaaacatcactcttcgaaaagaaacagataaatatgtagtagatataatagtcaatagattatacatcaagagagcagaaataaccgaattagtcgtcgaatatatgattgaacgatttatctcctttagcgtcattgtaaaggaatggggtatggagacattcattgaggacgaggataatattagatttactgtctacctaaatttcgttgaaccggaagaattgaatcttagtaagtttatgatggttcttccgggggcagccaacaagggaaagattagtaaattcaagattcctatctctgattatacgggatatgacgacttcaatcaaacaaaaaagctcaataagatgactgtagaactcatgaatctaaaagaattgggttctttcgatttggaaaacgtcaacgtgtatcctggagtatggaatacatacgatatcttcggtatcgaggccgctcgtgaatacttgtgcgaagccatgttaaacacctatggagaagggttcgattatctgtatcagccttgtgatcttctcgctagtttactatgtgctagttacgaaccagaatcagtgaataaattcaagttcggcgcagctagtactcttaagagagctacgttcggagacaataaagcattgttaaacgcggctcttcataaaaagtcagaacctattaacgataatagtagctgccacttttttagcaaggtccctaatataggaactggatattacaaatactttatcgacttgggtcttctcatgagaatggaaaggaaactatctgataagatatcttctcaaaagatcaaggaaatggaagaaacagaagacttttaattcttatcaataacatatttttctatgatctgtcttttaaacgatggattttccacaaatgcgcctctcaagtccctcatagaatgatacacgtataaaaaatatagcataggcaatgactccttatttttagacattagatatgccaaaatcatagccccgcttctatttactcccgcagcacaatgaaccaacacgggctcgtttcgttgatcacatttagataaaaaggcggttacgtcgtcaaaatatttactaatatcggtagttgtatcatctaccaacggtatatgaataatattaatattagagttaggtaatgtatatttatccatcgtcaaatttaaaacatatttgaacttaacttcagatgatggtgcatccatagcatttttataatttcccaaatacacattattggttacccttgtcattatagtgggagatttggctttgtgcatatctccagttgaacgtagtagtaagtatttatacaaacttttcttatccatttataacgtacaaatggataaaactactttatcggtaaacgcgtgtaatttagaatacgttagagaaaaggctatagtaggcgtacaagcagccaaaacatcaacacttatattctttgttattatattggcaattagtgcgctattactctggtttcagacgtctgataatccagtctttaatgaattaacgagatatatgcgaattaaaaatacggttaacgattggaaatcattaacggatagcaaaacaaaattagaaagtgatagaggtagacttctagccgctggtaaggatgatatatttgaattcaaatgtgtggatttcggcgcctattttatagctatgcgattggataagaaaacatatctgccgcaagctattaggcgaggtactggagacgcgtggatggttaaaaaggcggcaaaggtcgatccatctgctcaacaattttgtcagtatttgataaaacacaagtctaataatgttattacttgtggtaatgagatgttaaatgaattaggttatagcggttattttatgtcaccgcattggtgttccgattttagtaatatggaatagtgttagataaatgcggtaacgaatgttcctgtaaggaaccataacagcttagatttaacgttaaagatgagcataaacataataaacaaaattacaatcaaacttataacattaatatcaaacaatccaaaaaatgaaatcagtggagtagtaaacgcgtacataactcctggataacgtttagcagctgccgttcctattctagaccaaaaattcggtttcatgttttcgaaacggtattctgcaacaagtcgaggatcgtgttctacatatttggcggcattatccagtatctgcctattgatcttcatttcgttttcgattctggctatttcaaaataaaatcccgatgatagacctccagactttataatttcatctacgatgttcagcgccgtagtaactctaataatataggctgataagctaacatcataccctcctgtatatgtgaatatggcatgatttttgtccattacaagctcggttttaactttattgcctgtaataatttctctcatctgtaggatatctatttttttgtcatgcattgccttcaagacgggacgaagaaacgtaatatcctcaataacgttatcgttttctacaataactacatattctacctttttattttctaactcggtaaaaaaattagaatcccatagggctaaatgtctagcgatatttcttttcgtttcctctgtacacatagtgttacaaaaccctgaaaagaagtgagtatacttgtcatcatttctaatgtttcctccagtccactgtataaacgcataatccttgtaatgatctggatcatccttgactaccacaacatttcttttttctggcataacttcgttgtcctttacatcatcgaacttctgatcattaatatgctcatgaacattaggaaatgtttctgatggaggtctatcaataactggcacaacaataacaggagttttcaccgccgccatttagttattgaaattaatcatatacaactctttaatacgagttatattttcgtctatccattgtttcacattgacatatttcgacaaaaagatataaaatgcgtattccaatgcttctctgtttaatgaattactaaaatatacaaacacgtcactgtctggcaataaatgatatcttagaatattgtaacaatttattttgtattgcacatgttcgtgatctatgagttcttcttcgaatggcataggatctccgaatctgaaaacgtataaataggagttagaataataatatttgagagtattggtaatatataaactctttagcggtataattagtttttttctctcaatttctatttttagatgtgatggaaaaatgactaattttgtagcattagtatcatgaactctaatcaaaatcttaatatcttcgtcacacgttagctctttgaagtttttaagagatgcatcagttggttctacagatggagtaggtgcaacaattttttgttctacacatgtatgtactggagccattgttttaactataatggtgcttgtatcgaaaaactttaatgcagatagcggaagctcttcgccgcgactttctacgtcgtaattgggttctaacgccgatctctgaatggatactagttttctaagttctaatgtgattctctgaaaatgtaaatccaattcctccggcattatagatgtgtatacatcggtaaataaaactatagtatccaacgatcccttctcgcaaattctagtcttaaccaaaaaatcgtatataaccacggagatggcgtatttaagagtggattcttctaccgttttgttcttggatgtcatataggaaactataaagtccgcactactgttaagaatgattactaacgcaactatatagtttaaattaagcattttggaaacataaaataactctgtagacgatacttgactttcgaataagtttgcagacaaacgaagaaagaacagacctctcttaatttcagaagaaaactttttttcgtattcctgacgtctagagtttatatcaataagaaagttaagaattagtcggttaatgttgtatttcattacccaagtttgagatttcataatattatcaaaagacatgataatattaaagataaagcgctgactatgaacgaaatagctatatggttcgctcaagaatatagtcttgttaaacgtggaaacgataactgtatttttaatcacgtcagcggcatctaaattaaatataggtatatttattccacacactctacaatatgccacaccatcttcataataaataaattcgttagcaaaattattaattttagtgaaatagttagcgtcaactttcatagcttccttcaatctaatttgatgctcacacggtgcgaattccactctaacatcccttttccatgcctcaggttcatcgatctctataatatctagttttttgcgtttcacaaacacaggctcgtctctcgcgatgagatctgtatagtaactatgtaaatgataactagatagaaagatgtagctatatagatgacgatcctttaagagaggtataataactttaccccaatcagatagactgttgttatggtcttcggaaaaagaatttttataaatttttccagtattttccaaatatacgtacttaacatctaaaaaatccttaatgataataggaatggataatccgtctattttataaagaaatacatatcgcacattatacttttttttggaaatgggaataccgatgtgtctacataaatatgcaaagtctaaatattttttagagaatcttagttggtccaaattcttttccaagtacggtaatagatttttcatattgaacggtatcttcttaatctctggttctagttccgcattaaatgatgaaactaagtcactatttttataactaacgattacatcacctctaacatcatcatttaccagaatactgatcttcttttgtcgtaaatacatgtctaatgtgttaaaaaaaagatcatacaagttatacgtcatttcatctgtggtattcttgtcattgaaggataaactcgtactaatctcttctttaacagcctgttcaaatttatatcctatatacgaaaaaatagcaaccagtgtttgatcatccgcgtcaatattctgttctatcgtagtgtataacaatcgtatatcttcttctgtgatagtcgatacgttataaaggttgataacgaaaatatttttatttcgtgaaataaagtcatcgtaggattttggacttatattcgcgtctagtagatatgcttttatttttggaatgatctcaattagaatagtctctttagagtccatttaaagttacaaacaactaggaaattggtttatgatgtataatttttttagtttttatagattctttattctatacttaaaaaatgaaaataaatacaaaggttcttgagggttgtgttaaattgaaagcgagaaataatcataaattatttcattatcgcgatatccgttaagtttgtatcgtaatggcgtggtcaattacgaataaagcggatactagtagcttcacaaagatggctgaaatcagagctcatctaaaaaatagcgctgaaaataaagataaaaacgaggatattttcccggaagatgtaataattccatctactaagcccaaaaccaaacgagccactactcctcgtaaaccagcggctactaaaagatcaaccaaaaaggaggaagtggaagaagaagtagttatagaggaatatcatcaaacaactgaaaaaaattctccatctcctggagtcagcgacattgtagaaagcgtggccgctgtagagctcgatgatagcgacggggatgatgaacctatggtacaagttgaagctggtaaagtaaatcatagtgctagaagcgatctctctgacctaaaggtggctaccgacaatatcgttaaagatcttaagaaaattattactagaatctctgcagtatcgacggttctagaggatgttcaagcagctggtatctctagacaatttacttctatgactaaagctattacaacactatctgatctagtcaccgagggaaaatctaaagttgttcgtaaaaaagttaaaacttgtaagaagtaaatgcgtgcacttttttataaagatggtaaactctttaccgataataattttttaaatcctgtatcagacgataatccagcgtatgaggttttgcaacatgttaaaattcctactcatttaacagatgtagtagtatatgaacaaacgtgggaggaggcgttaactagattaatttttgtgggaagtgattcaaaaggacgtagacaatacttttacggaaaaatgcatgtacagaatcgcaacgctaaaagagatcgtatttttgttagagtatataacgttatgaaacgaattaattgttttataaacaaaaatataaagaaatcgtccacagattccaattatcagttggcggtttttatgttaatggaaactatgttttttattagatttggtaaaatgaaatatcttaaggagaatgaaacagtagggttattaacactaaaaaataaacacatagaaataagtcccgatgaaatagttatcaagtttgtaggaaaggacaaagtttcacatgaatttgttgttcataagtctaatagactatataaaccgctattgaaactgacggatgattctagtcccgaagaatttctgttcaacaaactaagtgaacgaaaggtatacgaatgtatcaaacagtttggtattagaatcaaggatctccgaacgtatggagtcaattatacgtttttatataatttttggacaaatgtaaagtccatatctcctcttccgtcaccaaaaaagttaatagcattaactatcaaacaaactgctgaagtggtaggtcatactccatcaatttcaaaaagagcttatatggcaacgactattttagaaatggtaaaggataaaaattttttagatgtagtatctaaaactacgttcgatgaattcctatctatagtcgtagatcacgttaaatcatctacggatggatgatatagatctttacacaaataattacaagaccgataaatggaaatggataagcgtatgaaatctctcgcaatgacagctttcttcggagagctaagcacattagatattatggcattgataatgtctatatttaaacgccatccaaacaataccattttttcagtggataaggatggtcagtttatgattgatttcgaatacgataattataaggcttctcaatatttggatctgaccctcactccgatatctggagatgaatgcaagactcacgcatcgagtatagccgaacaattggcgtgtgcggatattattaaagaggatattagcgaatatatcaaaactactccccgtcttaaacgatttataaaaaaataccgcaatagatcagatactcgtatcagtcgagatacagaaaagcttaaaatagctctagctaaaggcatagattacgaatatataaaagacgcttgttaataagtaaatgaaaaaaaactagtcgtttataataaaacacgatatggatgccaacgtagtatcattttctactattgcgacgtatatagacgctttagcgaagaatgcttcggaattagaacagaggtctaccgcatacgaaataaataatgaattggaactagtatttattaagccgccattgattactttgacaaatgtagtgaatatctctacgattcaggaatcgtttattcgatttaccgttactaataaggaaggtgttaaaattagaactaagattccattatctaaggtacatggtctagatgtaaaaaatgtacagttagtagatgctatagataacatagtttgggaaaagaaatcattagtgacggaaaatcgtcttcacaaagaatgcttgttgagactatcgacagaggaacgtcatatatttttggattacaagaaatatggatcctctatccgactagaattagtcaatcttattcaagcaaaaacaaaaaactttacgatagactttaagctaaaatattttctaggatccggtgcccagtctaaaagttctttgttgcacgctattaatcatccaaagtcaaggcctaatacatctctggaaatagaattcacacctagagacaatgaaacagttccatatgatgaactaataaaggaattgacgactctctcgcgtcatatatttatggcttctccagagaatgtaattctttctccgcctattaacgcgcctataaaaacctttatgttgcctaaacaagatatagtaggtttggatctggaaaatctatatgccgtaactaagactgacggcattcctataactatcagagttacatcaaacgggttgtattgttattttacacatcttggttatattattagatatcctgttaagagaataatagattccgaagtagtagtctttggtgaggcagttaaggataagaactggaccgtatatctcattaagctaatagagcctgtgaatgcaatcaatgatagactagaagaaagtaagtatgttgaatctaaactagtggatatttgtgatcggatagtattcaagtcaaagaaatacgaaggtccgtttactacaactagtgaagtcgtcgatatgttatctacatatttaccaaagcaaccagaaggtgttattctgttctattcaaagggacctaaatctaacattgattttaaaattaaaaaggaaaatactatagaccaaactgcaaatgtagtatttaggtacatgtccagtgaaccaattatctttggagaatcgtctatctttgtagagtataagaaatttagcaacgataaaggctttcctaaagaatatggttctggtaagattgtgttatataacggcgttaattatctaaataatatctattgtttggaatatattaatacacataatgaagtgggtattaagtccgtggttgtacctattaagtttatagcagaattcttagttaatggagaaatacttaaacctagaattgataaaaccatgaaatatattaactcagaagattattatggaaatcaacataatatcatagtcgaacatttaagagatcaaagcatcaaaataggagatatctttaacgaggataaactatcggatgtgggacatcaatacgccaataatgataaatttagattaaatccagaagttagttattttacgaataaacgaactagaggaccgttgggaattttatcaaactacgtcaagactcttcttatttctatgtattgttccaaaacatttttagacgattccaacaaacgaaaggtattggcgattgattttggaaacggtgctgacctggaaaaatacttttatggagagattgcgttattggtagcgacggatccggatgctgatgctatagctagaggaaatgaaagatacaacaaattaaactctggaattaaaaccaagtactacaaatttgactacattcaggaaactattcgatccgatacatttgtctctagtgtcagagaagtattctattttggaaagtttaatatcatcgactggcagtttgctatccattattcttttcatccgagacattatgctaccgtcatgaataacttatccgaactaactgcttctggaggcaaggtattaatcactaccatggacggagacaaattatcaaaattaacagataaaaagacttttataattcataagaatttacctagtagcgaaaactatatgtctgtagaaaaaatagctgatgatagaatagtggtatataatccatcaacaatgtctactccaatgactgaatacattatcaaaaagaacgatatagtcagagtgtttaacgaatacggatttgttcttgtagataacgttgatttcgctacaattatagaacgaagtaaaaagtttattaatggcgcatctacaatggaagatagaccgtctacaaaaaactttttcgaactaaatagaggagccattaaatgtgaaggtttagatgtcgaagacttacttagttactatgttgtttatgtcttttctaagcggtaaataataatatggtatgggttctgatctcccagttctaaatgcattaaataattccaatagagcgatttttgttcctataggaccttccaactgtggatactctgtattgttaatagatatattaatacttttgtcgggtaacagaggttctacgtcttctaaaaataaaagttttataacatctggcctgttcataaataaaaacttggcgattctatatatactcttattatcaaatctagccattgtcttatagatgtgagctactgtaggtgtaccatttgattttctttctaatactatatatttctctcgaagaagttcttgcacatcatctgggaataaaatactactgttgagtaaatcagttattttttttatatcgatattgatggacatttttatagttaaggataataagtatcccaaagtcgataacgacgataacgaagtatttatacttttaggaaatcacaatgactttatcagattaaaattaacaaaattaaaggagcatgtatttttttctgaatatattgtgactccagatacatatggatctttatgcgtcgaattaaatgggtctagttttcagcacggcggtagatatatagaggtggaggaatttatagatgctggaagacaagttagatggtgttctacatccaatcatatatctaaagatatacccgaagatatgcacactgataaatttgtcatttatgatatttatacgtttgattcgttcaagaataaacgattggtattcgtacaggtacctccgtcgttaggagatgatagtcatttgactaatccgttattgtcaccgtattatcgtaattcagtagccagacaaatggtcaatgatatgatttttaatcaagattcatttttaaaatatttattagaacatctgattagaagccactatagagtttctaaacatataacaatagttagatacaaggataccgaagaattaaatctaacgagaatatgttataatagagataagtttaaggcgtttgtattcgcttggtttaacggcgtttcggaaaatgaaaaggtactagatacgtataaaaaggtatctaatttgatataatgaattcagtgactgtatcacacgcgccatatactattacttatcacgatgattgggaaccagtaatgagtcaattggtagagttttataacgaagtagccagttggctgctacgagacgagacgtcgcctattcctgataagttctttatacagttgaaacaaccgcttagaaataaacgagtatgtgtgtgtggtatagatccgtatccgaaagatggaactggtgtaccgttcgaatcaccaaattttacaaaaaaatcaattaaggagatagcttcatctatatctagattaaccggagtaattgattataaaggttataaccttaatataatagacggggttataccctggaattattacttaagttgtaaattaggagaaacaaaaagtcacgcgatttactgggataagatttccaagttactgctgcagcatataactaaacacgttagtgttctttattgtttgggtaaaacagatttctcgaatatacgggccaagttagaatccccggtaactaccatagtcggatatcatccagcggctagagaccgccaattcgagaaagatagatcatttgaaattatcaacgttttactggaattagacaacaaggcacctataaattgggctcaagggtttatttattaatgctttagtgaaattttaacttgtgttctaaatggatgcggctattagaggtaatgatgttatctttgttcttaagactataggtgtcccgtcagcgtgcagacaaaatgaagatccaagatttgtagaagcatttaaatgcgacgagttagaaagatatattgagaataatccagaatgtacactattcgaaagtcttagggatgaggaagcatactctatagtcagaattttcatggatgtagatttagacgcgtgtctagacgaaatagattatttaacggccattcaagattttattatcgaggtgtcaaactgtgtagctagattcgcgtttacagaatgcggcgccattcatgaaaatgtaataaaatccatgagatctaatttttcattgactaagtctacaaatagagataaaacaagttttcatattatctttttagatacgtataccactatggatacattgatagctatgaaacgaacactattagaattaagtagatcatctgaaaatccactaaccagatcgatagacactgccgtatataggagaaaaacaactcttcgggttgtaggtactaggaaaaatccaaattgcgacactattcatgtaatgcaaccaccgcatgataatatagaagattacctattcacttacgtggatatgaacaacaatagttattacttttctctacaacaacgattggaggatttagttcctgataagttatgggaaccagggtttatttcattcgaagacgctataaaaagagtttcaaaaatattcattaattctataataaactttaatgatctcgatgaaaataattttacaacggtaccactggtcatagattacgtaacaccttgtgcattatgtaaaaaacgatcgcataaacatccgcatcaactatcgttggaaaatggtgctattagaatttacaaaactggtaatccacatagttgtaaagttaaaattgttccgttggatggtaataaactgtttaatattgcacaaagaattttagacactaactctgttttattaaccgaacgaggagaccatatagtttggattaataattcatggaaatttaacagcgaagaacccttgataacaaaactaattttgtcaataagacatcaactacctaaggaatattcaagcgaattactctgtccaagaaaacgaaagactgtagaagctaacatacgagacatgttagtagattcagtggagaccgatacctatccggataaacttccgtttaaaaatggtgtattggacctggtagacggaatgttttactctggagatgatgctaaaaaatatacgtgtactgtatcaaccggatttaaatttgacgatacaaagttcgtcgaagacagtccagaaatggaagagttaatgaatatcattaacgatatccaaccattaacggatgaaaataagaaaaatagagagctatatgaaaaaacattatctagttgtttatgcggtgctaccaaaggatgtttaacattcttttttggagaaactgcaactggaaagtcgacaaccaaacgtttgttaaagtctgctatcggtgacctgtttgttgagacgggtcaaacaattttaacagatgtattggataaaggacctaatccatttatcgctaacatgcatttgaaaagatctgtattctgtagcgaactacctgattttgcctgtagtggatcaaagaaaattagatctgacaatattaaaaagttgacagaaccttgtgtcattggaagaccgtgtttctccaataaaattaataatagaaaccatgcgacaatcattatcgatactaattacaaacctgtttttgataggatagataacgcattaatgagaagaattgccgtcgtgcgattcagaacacacttttctcaaccttctggtagagaggctgctgaaaataatgacgcgtacgataaagtcaaactattagacgaggggttagatggtaaaatacaaaataatatatatagatttgcatttctatacttgttggtgaaatggtacaaaaaatatcatgttcctattatgaaactatatcctacacccgaagagattcctgactttgcattctatctcaaaataggtactctgttggtatctagctctgtaaagcatattccattaatgacggacctctccaaaaagggatatatattgtacgataatgtggtcactcttccgttgactactttccaacagaaaatatccaagtattttaattctagactatttggacacgatatagagagcttcatcaatagacataagaaatttgccaatgttagtgatgaatatctgcaatatatattcatagaggatatttcatctccgtaaatatatgctcatatatttatagaagatatcacatatctaaatgaataccggaatcatagatttatttgataatcatgttgatagtataccaactatattacctcatcagttagctactctagattatctagttagaactatcatagatgagaacagaagcgtgttattgttccatattatgggatcaggtaaaacaataatcgctttgttgttcgccttggtagcttccagatttaaaaaggtttacattctagtgccgaacatcaacatcttaaaaattttcaattataatatgggtgtagctatgaacttgtttaatgacgaattcatagctgagaatatctttattcattccacaacaagtttttattctcttaattataacgataacgtcattaattataacggattatctcgctacaataactctatttttatcgttgatgaggcacataatatctttgggaataatactggagaacttatgaccgtgataaaaaataaaaacaagattccttttttactattgtctggatctcccattactaacacacctaatactctgggtcatattatagatttaatgtccgaagagacgatagattttggtgaaattattagtcgtggtaagaaagtaattcagacacttcttaacgaacgcggtgtgaatgtacttaaggatttgcttaaaggaagaatatcatattacgaaatgcctgataaagatctaccaacgataagatatcacggacgtaagtttctagatactagagtagtatattgtcacatgtctaaacttcaagagagagattatatgattactagacgacagctatgttatcatgaaatgtttgataaaaatatgtataacgtgtcaatggcagtattgggacaacttaatctgatgaataatttagatactttatttcaggaacaggataaggaattgtacccaaatctgaaaataaataatggcgtgttatacggagaagaattggtaacgttaaacattagttccaaatttaaatactttattaatcggatacagacactcaacggaaaacattttatatacttttctaattctacatatggcggattggtaattaaatatatcatgctcagtaatggatattctgaatataatggttctcagggaactaatccacatatgataaacggcaaaccaaaaacatttgctatcgttactagtaaaatgaaatcgtctttagaggatctattagatgtgtataattctcctgaaaacgatgatggtagtcaattgatgtttttgttttcatcaaacattatgtccgaatcctatactctaaaagaggtaaggcatatttggtttatgactatcccagatactttttctcaatacaaccaaattcttggacgatctattagaaaattctcttacgccgatatttctgaaccagttaatgtatatcttttagccgccgtatattccgatttcaatgacgaagtgacgtcattaaacgattacacacaggatgaattaattaatgttttaccatttgacatcaaaaagctgttgtatctaaaatttaagacgaaagaaacgaatagaatatactctattcttcaagagatgtctgaaacgtattctcttccaccacatccatcaattgtaaaagttttattgggagaattggtcagacaatttttttataataattctcgtattaagtataacgataccaagttacttaaaatggttacatcagttataaaaaataaagaagacgctaggaattacatagatgatattgtaaacggtcacttctttgtatcgaataaagtatttgataaatctcttttatacaaatacgaaaacgatattattacagtaccgtttagactttcctacgaaccatttgtttggggagttaactttcgtaaagaatataacgtggtatcttctccataaaactgatgagatatataaagaaataaatgtcgagctttgttaccaatggatacctttccgttacattggaaccacacgagctgacgttagacataaaaactaatattaggaatgccgtatataagacgtatctccatagagaaattagtggtaaaatggccaagaaaatagaaattcgtgaagacgtggaattacctctcggcgaaatagttaataattctgtagttataaacgttccgtgtgtaataacctacgcgtattatcacgttggggatatagtcagaggaacattaaacatcgaagatgaatcaaatgtaactattcaatgtggagatttaatctgtaaactaagtagagattcgggtactgtatcatttagcgattcaaagtactgcttttttcgaaatggtaatgcgtatgacaatggcagcgaagtcactgccgttctaatggaggctcaacaaggtatcgaatctagttttgtttttctcgcgaatatcgtcgactcataaaaaagagaatagcggtaagtataaacacgaatactatggcaataattgcgaatgttttattctcttcgatatatttttgataatatgaaaaacatgtctctctcaaatcggacaaccatctcataaaatagttctcgcgcgctggagaggtagttgccgctcgtataatctctccagaataatatacttgcgtgtcgtcgttcaatttatacggatttctatagttctctgttatataatgcggtttgccctcatgattagacgacgacaatagtgttctaaatttagatagttgatcagaatgaatgtttattggcgttggaaaaattatccatacagcgtctgcagagtggttgatagttgttcctagatatgtaaaataatccaacttactaggcagcaaattgtctagataaaatactgaatcaaacggtgcagacgtattggcggatctaatggaatccaattgattaactatcttttgaaaatatacatttttatgatccaatacttgtaagaatatagaaataatgataagtccatcatcgtgtttttttgcctcttcataagaactatattttttcttattccaatgaacaagattaatctctccagagtatttgtacacatctatcaagtgattggatccataatcgtcttcctttccccaatatatatgtagtgatgataacacatattcattggggagaaaccctccacttatatatcctcctttaaaattaatccttactagttttccagtgttctggatagtggttggtttcgactcattataatgtatgtctaacggcttcaatcgcgcgttagaaattgcttttttagtttctatattaataggagatagttgttgcggcatagtaaaaatgaaatgataactgtttaaaaatagctcttagtatgggaattacaatggatgaggaagtgatatttgaaactcctagagaattaatatctattaaacgaataaaagatattccaagatcaaaagacacgcatgtgtttgctgcgtgtataacaagtgacggatatccgttaataggagctagaagaacttcattcgcgttccaggcgatattatctcaacaaaattcagattctatctttagagtatccactaaactattacggtttatgtactacaatgaactaagagaaatctttagacggttgagaaaaggttctatcaacaatatcgatcctcactttgaagagttaatattattgggtggtaaactagataaaaaggaatctattaaagattgtttaagaagagaattaaaagaggaaagtgatgaacgtataacagtaaaagaatttggaaatgtaattctaaaacttacaacacgggataaattatttaataaagtatatataagttattgcatggcgtgttttattaatcaatcgttggaggatttatcgcatactagtatttacaatgtagaaattagaaagattaaatcattaaatgattgtattaacgacgataaatacgaatatctgtcttatatttataatatgctagttaatagtaaatgaacttttacagatctagtataattagtcagattattaagtataatagacgactagctaagtctattatttgcgaggatgactctcaaattattacactcacggcattcgttaaccaatgcctatggtgtcataaacgagtatccgtgtccgctattttattaactactgataacaaaatattagtatgtaacagacgagatagttttctctattctgaaataattagaactagaaacatgtttagaaagaaacgattatttctgaattattccaattatttgaacaaacaggaaagaagtatactatcgtcatttttttctctagatccagctactactgataatgatagaatagacgctatttatccgggtggcatacccaaaaggggtgagaatgttccagagtgtttatccagggaaattaaagaagaagttaatatagacaattcttttgtattcatagacactcggttttttattcatggcatcatagaagataccattattaataaattttttgaggtaatcttctttgtcggaagaatatctctaacgagtgatcaaatcattgatacatttaaaagtaatcatgaaatcaaggatctaatatttttagatccgaattcaggtaatggactccaatacgaaattgcaaaatatgctctagatactgcaaaacttaaatgttacggccatagaggatgttattatgaatcattaaaaaaattaactgaggatgattgattaaaaaatataaattaatttaccatcgtgtatttttataacgggattgtccggcatatcatgtagatagttaccgtctacatcgtatactcgaccatctacgcctttaaatcctctatttattgacattaatctattagaattggaataccaaatattagtaccctcaattagtttattggtaatattttttttagacgatagatcgatggctcttgaaaccaaggttttccaaccggactcattgtcgatcggtgagaagtctttttcattagcatgaatccattctaatgatgtatgtttaaacactctaaacaattggacaaattcttttgatttgctttgaatgatttcaaataggtcttcgtctacagtaggcataccattagataatctagccattataaagtgcacgtttacatatctacgttctggaggagtaagaacgtgactattgagacgaatggctcttcctactatctgacgaagagacgcctcgttccatgtcatatctaaaatgaagatatcattaattgagaaaaaactaataccctcgcctccactagaagagaatacgcatgttttaatgcattctccgttagtgtttgattcttggttaaactcagccaccgccttgattctagtatcttttgttctagatgagaactctatattagagataccaaagactttgaaatatagtaataagatttctattcctgactgattaacaaatggttcaaagactagacatttaccatgggatgctaatattcccaaacatacatctataaatttgacgcttttctcttttaattcagtaaatagagagatatcagccgcactagcatcccctttcaatagttctccctttttaaaggtatctaatgcggatttagaaaactctctatctcttaatgaatttttaaaatcattatatagtgttgctatctcttgcgcgtattcgcccggatcacgattttgtctttcaggaaagctatcgaacgtaaacgtagtagccatacgtctcagaattctaaatgatgatatacctgtttttatttcagcgagtttagccttttgataaatttcttcttgctttttcgacatattaacgtatcgcattaatactgttttcttagcgaatgatgcagacccttctacgtcatcaaaaatagaaaactcgttattaactatatacgaacatagtcctcctagtttggagactaattctttttcatcgactagacgtttattctcaaatagcgattggtgttgtaaggatcctggtcgtagtaagttaaccaacatggtgaattcttgcacactattgacgataggtgtagccgataaacaaatcatcttatggttttttaacgcaatggtcttagataaaaaattatatactgaacgagtaggacggatcttaccatcttctttgattaatgatttagaaatgaagttatgacattcatcaataatgacgcatattctactcttggaattaatagttttgatattagtaaaaaatttatttctaaaattttgatcatcgtaattaataaaaatacaatccttcgttatctctggagcgtatctgagtatagtgttcatccaaggatcttctatcaaagcctttttcaccaataagataatagcccaattcgtataaatatccttaagatgtttgagaatatatacagtagtcattgttttaccgacacccgtttcatggaacaataaaagagaatgcatactgtctaatcctaagaaaactcttgctacaaaatgttgataatccttgaggcgtactacgtccgaccccatcatttcaacgggcatattagtagttctgcgtaaggcataatcgatataggccgcgtgtgatttactcatttatgagtgataagtaataactatgttttaaaaatcacagcagtagtttaactagtcttctctgatgtttgttttcgatactttttgaatcagaagtcatactagaataaagcaacgagtgaacgtaatagagagcttcgtatactctattcgaaaactctaagaacttattaatgaattccgtatccactggattgtttaaaatactaaattgaacactgttcacatccttccaagaagaagacttagtgacggacttaacatgagacataaataaatccaaattttttttacaaacatcactagccaccataatggcgctatctttcaaccagctatcgcttacgcattttagcagtctaacatttttaaagagactacaatatattctcatagtatcgattacacctctaccgaataaagttggaagtttaataatacaatatttttcgtttacaaaatcaaataatggtcgaaacacgtcgaaggttaacatcttataatcgctaatgtatagattgttttcagtgagatgattattagatttaatagcatctcgttcacgtttgaacagtttattgcgtgcgctgaggtcggcaactacggcgtccgctttagtactcctcccataatactttacgctattaatctttaaaatttcatagactttatctagatcgctttctggtaacatgatatcatgtgtaaaaagttttaacatgtcggtcggcattctatttagatcattaactctagaaatctgaagaaagtaattagctccgtattccagactaggtaatgggcttttacctagagacagattaagttctggcaatgtttcataaaatggaagaaggacatgcgttccctcccggatattttttacaatttcatccatttacaactctatagtttgttttcattattattagttattatctcccataatcttggtaatacttaccccttgatcgtaagataccttatacaggtcattacatacaactaccaattgtttttgtacataatagattggatggttgacatccatggtggaataaactactcgaacagatagtttatctttccccctagatacattagccgtaatagttgtcggcctaaagaatatctttggtgtaaagttaaaagttagggttcttgttccattattgctttttgtcagtagttcattataaattctcgagatgggtccgttctctgaatatagaacatcatttccaaatctaacttctagtctagaaataatatcggtcttattcttaaaatctattcccttgatgaagggatcgttaatgaacaaatccttggcctttgattcggctgatctattatctccgttatagacgttacgttgactagtccaaagacttacaggaatagatgtatcgatgatgttgatactatgtgatatgtgagcaaagattgttctcttagtggcatcactatatgttccagtaatggcggaaaactttttagaaatgttatatataaaagaattttttcgtgttccaaacattagcagattagtatgaagataaacactcatattatcaggaacattatcaatttttacatacacatcagcatcttgaatagaaacgataccatcttctggaacctctacgatctcggcagactccggataaccagtcggtgggccatcgctaacaataactagatcatccaacaatctactcacatatgcatctatataatctttttcatcttgtgagtaccctggatacgaaataaatttattatccgtatttccataataaggtttagtataaacagagagagatgttgccgcatgaacttcagttacagtcgccgttggttggtttatttgacctattactctcctaggtttctctataaacgatggtttaatttgtacattcttaaccatatatccaataaagctcaattcaggaacataaacaaattctttgttgaacgtttcaaagtcgaacgaagagtcacgaataacgatatcggatactggattgaaggttaccgttacggtaatttttgaatcggatagtttaagactgctgaatgtatcttccacatcaaacggagttttaatataaacgtatactgtagatggttctttaatagtgtcattaggagttaggccaatagaaatatcattaagttcactagaatatccagagtgtttcaaagcaattgtattattgatacaattattatataattcttcgccctcaatttcccaaataacaccgttacacgaagagatagatacgtgattaatacatttatatccaacatatggtacgtaactgaatcttcccatacctttaacttctggaagttccaaactcagaaccaaatgattaagcgcagtaatatactgatccctaatttcgaagctagcgatagcctgattgtctggaccatcgtttgtcataactccggatagagaaatatattgcggcatatacaaagttggaatttgactatcgactgcgaagacattagaccgtttaatagagtcatccccaccgatcaaagaattaatgatagtattattcattttctatttaaaatggaaaaagcttacaataaactccgtagagaaatatctataatttgtgagttttccttaaagtaacagcttccgtaaacgccgtctttatctcttagtaggtttattgtatttatgaccttttccttatcttcatagaatactaaaggcaacaaagaaatttttggttcttctctaagagctacgtgagacttaaccatagaagccaacgaatccctacatattttagaacagaaataccctacttcaccacccttgtatgtctcaatactaataggtctaaaaaccaaatcttgattacaaaaccaacacttatcaattacactatttgtcttaatagacacatctgccatagatttataatactttggtagtatacaagcgagtgcttcttctttagcgggcttaaagactgctttaggtgctgaaataaccacatctggaaggcttactcgcttagccatttaattacggaactatttttttatacttctaatgagcaagtagaaaacctctcatctacaaaaacgtactcgtgtccataatcctctaccatagttacacgttttttagatctcatatgtgctaaaaagttttcccatactaattggttactattatttttcgtataatttttaacagtttgaggttttagatttttagttacagaagtgatatcgaatattttatccaaaaagaatgaataattaattgtcttagaaggagtgttttcttggcaaaagaataccaagtgcttaaatatttctactacttcattaatcttttctgtactcagattcagtttctcatcttttacttgattgattatttcaaagactaacttataatcctttttatttattctctcgttagccttaagaaaactagatacaaaatttgcatctacatcatccgtggatatttgatttttttccatgatatccaagagttccgagataatttctccagaacattgatgagacaataatctccgcaatacatttctcaaatgaataagtttattagacacgtggaagtttgactttttttgtacctttgtacatttttgaaataccgactcgcaaaaaatacaatattcatatccttgttcagatactataccgttatgtctacaaccgctacataatcgtagattcatgttaacactctacgtatctcgtcgtccaatattttatataaaaacattttatttctagacgttgccagaaaatcctgtaatatttttagttttttgggctgtgaataaagtatcgccctaatattgttaccgtcttccgccaatatagtagttaaattatccgcacatgcagaagaacaccgcttaggcggattcagtacaatgttatatttttcgtaccaactcatttaaatatcataatctaaaatagttctgtaatatgtctagcgctaatatattgatcataatcctgtgcataaattaagatacaacaatgtctcgaaatcatcgacatggcttcttccatagttagaagatcgtcgtcaaagttagcaacgtgattcatcaacatttgctgttttgaggcagcaaatactgaaccgtcgccattcaaccattcataaaaaccatcgtctgaatccattgataatttcttgtactggtttttgagagctcgcatcaatctagcatttctagctcccggattgaaaacagaaagaggatcgtacatccagggtccattttctgtaaatagaatcgtataatgtcccttcaagaagatatcagacgatccacaatcaaagaattggtctccgagtttgtaacaaactgcggactttaacctatacatgataccgtttagcataatttctggtgatacgtcaatcggagtatcatctattagagatctaaagccggtgtaacattctccaccaaacatattcttattctgacgtcgttctacataaaacatcattgctccattaacgataacaggggaatgaacagcactacccatcacattagttcccaatggatcaatgtgtgtaactccagaacatcttccatagcctatgttaggaggagcgaacaccactcttccactattgccatcgaatgccatagaataaatatccttggaattgatagaaatcggactgtcggatgttgtgatcatcttcataggattaacaactatgtatggtgccgcctgaagtttcatatcgtaactgatgccgtttataggtctagccacagaaaccaacgtaggtctaaatccaactatagacaaaatagaagccaatatctgttcctcatctgtcataacttgagagcatccagtatgaataatcttcattagatggggatctaccgcatcatcatcgttacaataaaaaattcccattctaatgttcataattgcttttctaatcatggtatgcatgtttgctctctgaatctctgtggaaattagatctgatacacctgtaatcactatcggattatcctccgtaagacgattaaccaacaacatataattataagactttacttttctaaattcataaagttgctggattaggctataggtgtctccatgtacatacgcgttctcgagcgcaggaagtttaataccgaatagtgccatcagaataggatgaatatagtaattagtttctggttttctataaataaaagacaaatcttgtgaactagacatatcggtaaaatgcatggattggaatcgtgtagtcgacagaagaatatgatgattagatggagagtatattttatctaactctttgagttggtcaccgattctaggactagctcgagaatgaataagtactaaaggatgagtacatttcacagaaacactagcattgttcaatgtgctctttacatgggtaaggagttgaaatagctcgtttctatttgttctgacaatatttagtttattcataatgttaagcatatcctgaatagtaaagttagatgtgtcatacttgttagtagttagatatttagcaattgcattcccatcatttctcaatctcgtactccaatcatgcgtggatgctacttcgtcgatggaaaccatacaatcctttttgataggctgttgagattgatcatttcctgcacgtttaggtttggtacgttgatttctagcccctgcggatataaagtcatcgtctacaatttgggacaatgaattgcatacactacaagacaaagatttatcagaagtgtgaatatgatcttcatctaccaaagaaagagtttgattagtataactagattttagtcctgcgttagatgttaaaaaaacatcgctattgaccacggcttccattatttatattcgtagtttttactcgaaagcgtgattttaatatccaatcttattacttttggaatcgttcaaaacctttgactagttgtagaatttgatctattgccctacgcgtatactcccttgcatcatatacgttcgtcaccagatcgtttgtttcggcctgaagttggtgcatatctctttcaacattcgacatgagatccttaagggccatatcgtctagattttgttgagatgctgctcctggatttggattttgttgtgctgttgtacatactgtaccaccagtaggtgtaggagtacatacagtggccacaataggaggttgagaaagtgtaaccgttggagtagtacaagaaatacttccatccgattgttgtgtacatgtagttgttggtaacgtctgagaaggttgggtagatggcggcgtcgtcgttttttgatctttattaaatttagagataatatcctgaacagcattgctcggcgtcaacgctggaaggagtgaactcgccggcgcatcagtatcttcagacagccaatcaaaaagattagacatatcagatgatgtattagtttgttgtcgtggttttggtgtaggagcagtactactaggtagaagaataggagccgatgtagctgttggaaccggctgtggagttatatgaatagttggttgtagcggttggataggctgtctgctggcggccatcatattatctctagctagttgttctcgcaactgtctttgataatacgactcttgagactttagtcctatttcaatcgcttcatcctttttcgtatccggatccttttcttcagaataatagattgacgactttggtgtagaggattctgccagcctctgtgagaacttgttaaagaagtccatttaaggctttaaaattgaattgcgattataagattaaatggcagacacagacgatattatcgactatgaatccgatgatctcaccgaatacgaggatgatgaagaagaggaagaagatggagagtcactagaaactagtgatatagatcccaaatcttcttataagattgtagaatcagcatccactcatatagaagatgcgcattccaatcttaaacatatagggaatcatatatctgctcttaaacgacgctatactagacgtataagtctatttgaaatagcgggtataatagcagaaagctataacttgcttcaacgaggaagattacctctagtttcagaattttctgacgaaacgatgaagcaaaatatgctacatgtaattatacaagagatagaggagggttcttgtcctatagtcatcgaaaagaacggagaattgttgtcggtaaacgattttgacaaagatggtctaaaattccatctagactatattatcaaaatttggaaacttcaaaaacgatattagaatttatacgaatatcgttctctaaatgtcacaatcaagtctcgcatgttcagcaatttattgtcgtactttatatcgtgttcattaacgatatcttgcaaaatagtaatgattctatcttccttcgatagatattcttcagagattattgtcttatattctttcttgttatcagatatgaatttgataagactttgaacattattgatacccgtctgtttaattttttctacagatattttagttttggcagattctatcgtatctgtcaatagacatccaacatcgacattcgacgtcaattgtctataaatcaacgtataaattttagaaataacattagcgaattgttgtgcgttgatgtcgttattctgaaacagtatgattttaggtagcattttcttaacaaagagaacgtatttattgttactcagttgaacagatgatatatccagattactaacgcatctgattccgtataccaaactttcagaagaaatggtatacaattgtttgtattcattcaatgtctctttttcagaaattagtttagagtcgaatactgcaataattttcaagagatagttttcatcagataagattttatttagtgtagatatgataaaactattgttttgttggagaacttgatacgccgcgttctctgtagtcgacgctctcaaatgggaaacaatctccattatttttttggaatcggatactatatcttcggtatcttgacgcagtctagtatacatagagttaagagagattagagtttgtacattaagcaacatgtctctaaatgtggctacaaacttttcctttttcacatcatctagtttattatataccgatttcacaacggcaccagatttaaggaaccagaatgaaaaactctgataactacaatatttcatcatagttacgattttatcatcttctatagttggtgtaatagcgcatacctttttctccaagactggaaccaacgtcataaaaatgtttaaatcaaaatccatatcaacatctgatgcgctaagaccagtctcgcgttcaagattatctttactaatggtgacgaactcatcgtataaaactctaagtttgtccattatttatttacagatttagttgtttaatttatttgtgctcttccagagttgggatagtatttttctaacgtcggtattatattattaggatctacgttcatatgtatcataatattaatcatccacgttttgataaatctatctttagcttctgaaataacgtatttaaacaaaggagaaaaatatttagctacggcatcagacgcaataacattttttgtaaatgtaacgtatttagacgacagatcttcgttaaaaagttttccatctatgtagaatccatcggttgttaacaccattcccgcgtcagattgaataggagtttgaatagtttgttttggaaatagatccttcaataacttatagttgggtgggaaaaaatcgattttatcactagactctttcttttttactatcattacctcatgaactatttcttgaatgagtatatgtattttctttcctatatcggacgcgttcattggaaaatataccatgtcgttaactataagaatatttttatcctcgtttacaaactgaataatatcagatgtagttcgtaaacgaactatatcatcaccagcacaacatctaactatatgatatccactagtttcctttagccgtttattatcttgttccatattagcagtcattccatcatttaagaaggcgtcaaaaataatagggagaaatgacattttggattctgttacaactttaccaaaattaaggatatacggacttactatctttttctcaacgtcaatttgatgaacacacgatgaaaatgtgcttctatgagattgatcatgtagaaaacaacaagggatacaatatttccgcatatcatgaaatatattaagaaatcccaccttattatatttccccaaaggatccatgcacgtaaacattatgccgttatcattaataaagacttctttctcatcggatctgtaaaagttgttactgatttttttcattccaggatctagataattaataatgatgggttttctattcttattctttgtattttggcatatcctagaccagtaaacagtttccactttggtaaaatcagcagacttttgaacgctattaaacatggcattaatggcaataactaaaaatgtaaaatatttttctatgttaggaatatggtttttcactttaatagatatatggtttttggccaaaatgatagatatttttttatccgaggatagtaaaatattattagtcgccgtctctataaaaatgaagctagtctcgatatccaattttattctagaattgataggagtcgccaaatgtaccttatacgttatatctcccttgatgcgttccatttgtgtatctatatcggacacaagatctgtaaatagttttacgttattaatcatcacggtatcgccgtcgctagataacgctaatgtaccatccaagtcccaaatggagagatttaactgttcatcgtttagaataaaatgattaccggtcatattaataaagtgttcatcgtatctagataacaacgacttataattaatgtccaagtcttgaactcgctgaatgatcttttttaacccagttagttttagattggtacgaaatatattgttaaactttgattctacagtaatgtccaaatctagttgtggaaatacttccatcaacattgtttcaaacttgataatattattatctacatcttcgtacgatccaaattccggaatagatgtatcgcacgctctggccacccagataaccaaaaagtcacacgctccaggatatacattgtataaaaagctatcgttttttagtagggtttttttctgcgtgtatacgaagggattaaaaatagtattatcaacgtaactatattccaaattattcttatgagaatagataataatatcgtccttaatatctaacaaatttcctaaatatccctttaattgagtcattcgaagcgtcaatagaatatgtctcttaactatttccggctgttgtatatttaaatgacttcgtaaaaaataatatatgggcgacttctcatctatgtaatcatatggagtgagatatagggctcgttctacctcctgccccttacccacctgtaataccaattgcggacttactatatatcgcatatttatatcgtggggtaaagtgaaaatctactaccgatgatgtaagtcttacaatgttcgaaccagtaccagatcttaatttggaggcctccgtagaactaggggaggtaaatatagatcaaacaacacctatgataaaggagaatagcggttttatatcccgcagtagacgtctattcgcccatagatctaaggatgatgagagaaaactagcactacgattctttttacaaagactttattttttagatcatagagagattcattatttgttcagatgcgttgacgctgtaaaagacgtcactattaccaaaaaaaataacattatcgtggcgccttatatagcacttttaactatcgcatcaaaaggatgcaaacttacagaaacaatgattgaagcattctttccagaactatataatgaacatagtaagaaatttaaattcaactctcaagtatccatcatccaagaaaaactcggataccagtttggaaactatcacgtttatgattttgaaccgtattactctacagtagctctggctattcgagatgaacattcatctggcatttttaatatccgtcaagagagttatctggtaagttcattatctgaaataacatatagattttatctaattaatctaaaatctgatcttgttcaatggagtgctagtacgggcgctgtaattaatcaaatggtaaatactgtattgattacagtgtatgaaaagttacaactggtcatagaaaatgattcacaatttacatgttcattggctgtggaatcaaaacttccaataaaattacttaaagatagaaatgaattatttacaaaattcattaacgagttaaaaaagaccagttcattcaagataagcaaacgcgataaggatacgctactaaaatattttacttaggactggagttagaatttatagacgactcatttcgtttatcattgttactattattactattactatcattattagtgttggcattattagtattcttcttgtcatcttgttcagaaatatacagcaatgctatacctaatactaaatacattatcatgctcgcaatggctctaacaacaacgaaccaaaatgaatttggtcgtagcttttgttcacaaaaatacataaagaaatgtctacataaatctatggcgccattggctacttgaaatagcgccagtcctcctacagattttaatatagctgtataacatgacatttattcatcatcaaaagagacagagtcaccatctgtcatatttagattttttttcatgtgttcaaagtatcctctactcatttcattataatagtttatcatacttagaattttaggacggatcaatgagtaagacttgactagatcgtcagtagtaatttgtgcatcgtctattctgcatccgcttcgtcgaataatgtatagcatcgctttgagattctccatagctatcaagtctttatacaatgacatggaaatatctgtgaatactttatacttctccaacatcgatgccttaacatcatcgcctactttagcattgaaaatacgttctattgtgtagatggatgtagcaagatttttaaacaacaatgccatcttacacgatgattgcctcaagtctccaatcgtttgtttagaacgattagctacagagtccaatgcttggctgactagcatattattatctttagaaattgtattcttcaatgaggcgtttatcatatctgtgatttcgttagtcatattacagtctgactgggttgtaatgttatccaacatatcacctatggatacggtacacgtaccagcatttgtaataatcctatctaagatgttgtatggcattgcgcagaaaatatcttctcctgtaatatctccactctcgataaatctactcagattattcttaaatgccttattctctggagaaaagatatcagtgtccatcatttcattaatagtatacgcagaaaagataccacgagtatcaattctatccaagatacttatcggttccgagtcacagataatggtttcctctccttcgggagatcctgcatagaaatatctaggacaatagtttctatactgtctgtaactctgataatctctaaagtcactaactgataccatgaaattgagaagatcaaacgctgaagtaattaatttttctgcctcgtttttactacaactagttttcatcaatgtagtgacgatgtattgtttagttacttttggtctaatactgatgatagagatattattgcttcccataatggatcttctagtagtcaccttaaagcccattgatgcgaatagcagatagataaagtcttggtatgactcctttctaatatagtacggactacctttgtcacccaactttatacccacataagccataacaacctctttaatagccgtttcatgaggtttatcagccatgagcctgagtagttggaagaatctcatgaatcccgtctcagaaagtcctatatgcatgatagatttatctttcctgggaaactctcgtatagtcatagatgaaatactctttaaagtttctgaaataagattagtaacagtcttacctccgactactctaggtaacaaacaaactctaataggtgttttctctgcggagataatatcagaaaggatagagcaataagtagtattattgtgattataaagaccgaatacataacaggtagaatttataaacatcatgtcctgaaggtttttagacttgtattcctcgtaatccataccgtcccaaaacatggatttggtaactttgatagccgtagatctttgttccttcgccaacaggttaaagaaattaataaagaatttgttgtttctatttatgtccacaaattgcacgtttggaagcgccacggttacattcactgcagcattttgaggatcgcgagtatgaagtacgatgttattgtttactggtatatctggaaagaaatctaccagtctaggaataagagattgatatcgcatagaaatagtaaagtttataatctcatcatcgaagagcattttgttaccattgtaataaatatccactctgtcatatgtataaatgaagtactgttcaaacatgatgagatgtttatatgttggcatagtagtgagatcgacgtttggtaatggcaatgtattaagattaactccataatgtctagcagcatctgcgatgttataagcgtcgtcaaagcggggtcgatcttgtattgttatatattgtctaacacctataagattatcaaaatcttgtctgcttaatacaccgttaacaatttttgccttgaattcttttattggtgcattaataacatccttatagaggatgttaaacaaataagtgttatcaaagttaagatctggatatttcttttctgctagaacatccattgagtcggagccatctggtttaatataaccaccgataaatctagctctgtattctgtatccgtcaatctaatattaagaaggtgttgagtgaaaggtggaagatcgtaaaagctgtgagtattaatgataggattagtttccgaactaatgttaattggggtattaataatatctatatttccagcgttaagtgtaacattaaacagttttaattcacgtgacgtggtatcaattaaataattaatgcccaatttggatatagcagcctgaagctcatcttgtttagttacggatcctaatgagttattaagcaatatatcgaacggatgaacgaaggttgttttaagttggtcacatactttgtaatctagacatagatgcggaagaacggtagaaactatacgaaataaatattcagagtcctctaattgatcaagagtaactattgacttaataggcatcatttatttagtattaaatgacgaccgtaccagtgacggatatacaaaacgatttaattacagagttttcagaagataattatccatctaacaaaaattatgaaataactcttcgtcaaatgtctattctaactcacgttaacaacgtggtagatagagaacataatgccgccgtagtgtcatctccagaggaaatatcctcacaacttaatgaagatctatttccagatgatgattcaccggccactattatcgaacgagtacaacctcatactactattattgacgatactccacctcctacgtttcgtagagagttattaatatcggaacaacgtcaacaacgagaaaaaagatttaatattacagtatcgaaaaatgctgaagcaataatggaatctagatctatgataacttctatgccaacacaaacaccatccttgggagtagtttatgataaagataaaagaattcagatgttagaggatgaagtggttaatcttagaaatcaacgatctaatacaaaatcatctgataatttagataattttaccaaaatactatttggtaagactccgtacaaatcaacagaagttaataagcgtatagccatcgttaattatgcaaatttgaacgggtcccccttatcagtcgaggacttggatgtttgttcggaggatgaaatagatagaatctataaaacgattaaacaatatcacgaaagtagaaaacgaaaaattatcgtcactaacgtgattattattgtcataaacattatcgagcaggcattgctaaaactcggatttgaagaaatcaaaggactgagtaccgatatcacttcagaaattatcgatgtggagatcggagatgactgcgatgctgtagcatctaaactaggaatcggtaacagtccggttcttaatattgtattgtttatactcaagatattcgttaaacgaattaaaattatttaatttaatacattcccatatccagacaacaatcgtctggattaatctgttcctgtcgtctcataccggacgacatattaatctttttattagtgggcatctttttagatggtttctttttcccagcattaactgagtcgatacctagaagatcgtgattgatctctccgaccattccacgaacttctaattggccgtctctgacggtaccataaactattttaccagcattagtaacagcttggacaatctgaccatccatcgcattgtacgatgtagtagtaactgttgttctacgtctaggagcaccagaagtatttttggagcccttggatgttgatgtagaagaagacgaggattttgattttggtttacatgtaatacattttgaactctttgattttgtatcacatgcgccggcagtcacatctgtttgagaattaagattattgttgcctcctttgacggctgcatctccaccgatttgcgctagtagatttttaagctgtggtgtaatcttattaactgtttcgatataatcatcgtaactgcttctaacggctaaattttttttatccgccatttagaagctaaaaatatttttatttatgcagaagatttaactagattatacaatgaactaatatgatccttttccagattatttacaaacttggtattttttggttctggaggaggcgaatttaaattcggacttggattcggattttgtaagttcttgatcttattatacatcgagtataggatggcgacagtaactgctacacaaataccgatcaaaagaagaataccaatcatttattgacaataacttcactattgatcaagtatgcaatatatcatcttttcactaaataagtagtaataatgattcaacaatgtcgagatatatggacgataataatttagttcatggaaatatcgctatgattggtgtgaatgactccgctaactctgtggggtgcgcagtgctttccccacatagaataaattagcattccgactgtgataataataccaagtataaacgccataatactcaatactttccatgtacgagtgggactggtagacttactaaagtcaataaaggcgaagatacacgaaagaatcaaaagaatgattccagcgattagcacgccggaaaaataatttccaatcataagcatcatgtccatttaactaataaaaattttaaatcgccgaatgaacaaagtggaatataaaccatataaaaacaatagtttgtactgcaaaaataatatctatttttgttttcgaagatatggtaaaattaaatagtagtacacagcatgttataactaacagcagcaacggctcgtaattacttatcatttactagacgaaaaggtggtgggatattttcttgctcaaataatacgaatatatcacccatccattttatgcgatgtttatatactctaatctttaatagatctatagacgacgggtttaccaacaatatagattttatcgattcatctaatttaaacccttccttaaacgtgaatgatctattatctggcataacgatgaccctacctgatgaatcggacaatgtactgggccatgtagaataaattatcaacgaattatcgtctacgaacatttatatcatttgttttaattttaggacgcgaataaatggatataaaatagaaaataacagatattacaaccagtgttatggccgcgcccaaccaggtaggcagttttattttatcttttactacaggttctcctggatgtacgtcaccaacggcggacgtagttctagtacaattagacgtaagttccgcttgggaattttttaacgctaaagagttaacgttaatcgtgcacccaacgtatttacatctagttcgttgaacatcttgattataatataaccattttctatctctagattcgtcagtgcactcatgtaaccaacataccctaggtcctaaatatttatctccggaattagattttggataattcgcgcaccaacaatttctatttcctttatgatcgttacaaaagacgtataatgccgtatccccaaaagtaaaataatcaggacgaataattctaataaactcagaacaatatctcgcatccatatgtttggagcaaatatcggaataagtagacatagccggtttccgttttgcacgtaaccattctaaacaattggggtttccaggatcgtttctacaaaatccagtcatgaaatcgtcacaatgttctgtcttgtaattattattaaatatttttggacagtgtttggtatttgtcttagaacaacattttgccacgctatcactatcgcccaggagataatccttttttataaaatgacatcgttgcccggatgctatataatcagtagcgtgttttaaatccttaatatattcaggagttacctcgttctgataatagattaatgatccaggacgaaatttgaaagaactacatggttctccatgaattaatacatattgtttagcaaattcaggaactataaaactactacaatgatctatcgacataccatctatcaaacaaaacttgggtttaatttctcccggagatgtttcataatagtacgtataactttcttctgcaaacttaacagctctattatattcaggataattaaaacctaattccatatatttgtctcgtatatctgctattcctggtgctattttgattctattaagagtaacagctgcccccattcttaataatcgtcagtatttaaactgttaaatgttggtatatcaacatctaccttatttcccgcagtataaggtttgttgcaggtatactgttcaggaatggttacatttatacttcttctatagtcctgtctttcgatgttcatcacatatgcaaagaacagaataaacaaaataatgtaagaaataatattaaatatctgtgaattcgtaaatacattgattgccataataattacagcagctacaatacacacaatagacattcccacagtgttgccattacctccacgatacatttgagttactaagcaataggtaataactaagctagtaagaggcaatagaaaagatgagataaatatcatcaatatagagattagaggagggctatatagagccaagacgaacaaaatcaaaccgagtaacgttctaacatcattatttttgaagattcccaaataatcattcattcctccataatcgttttgcatcatacctccatctttaggcataaacgattgctgctgttcctctgtaaataaatctttatcaagcactccagcacccgcagagaagtcgtcaagcatattgtaatatcttaaataactcatttatatattaaaaaatgtcactattaaagatggagtataatctttatgccgaactaaaaaaaatgacttgtggtcaacccctaagtctttttaacgaagacggggatttcgtagaagttgaaccgggatcatcctttaagtttctgatacctaagggattttacgcctctccttccgtaaagacgagtctagtattcgagacattaacaacgaccgataataaaatcactagtatcaatccaacaaatgcgccaaagttatatcctcttcaacgcaaagtcgtatctgaagtagtttctaatatgaggaaaatgatcgaatcaaaacgtcctctatacatcactcttcacttggcgtgtggatttggtaagactattaccacgtgttatcttatggctacacacggtagaaaaaccgtcatttgcgtacccaataaaatgttaatacatcaatggaagacacaggtagaggcagtcggattggaacataagatatccatagatggagtaagtagtctattaaaggaactaaagactcaaagtccggatgtattaatagtagtcagtagacatctgacaaacgatgccttttgtaaatatatcaataagcattatgatttgttcatcttggatgaatcacatacgtataatctgatgaacaatacagcagttacaagatttttagcgtattatcctccgatgatgtgttattttttaactgctacacctagaccatctaaccgaatttattgtaacagtattattaatattgccaagttatccaatctaaaaaaaactatctatgcagtagatagtttttttgagccatattccacagataatattagacatatggtaaaacgactagatggaccatctaataaatatcatatatataccgagaagttattatctgtagacgagcctagaaatcaacttattcttgataccctggtagaagaattcaagtcaggaactattaatcgcattttagttattactaaactacgtgaacatatggtattattctacaaacgattattagattttttcggaccagaggttgtatttataggagacgcccaaaatagacgtactccagatatggtcaaatcaatcaaggaactaaatagatttatattcgtatccaccttattttattccggtactggtttagatattcctagtttggattcgttgttcatttgctcggcagtaatcaacaatatgcaaatagagcaattactagggagggtatgtcgagaaacagaactattagataggacggtatatgtatttcctaacacatccatcaaagaaataaagtacatgataggaaatttcatgcaacgaattattagtctgtctgtagataaactaggatttaaacaaaaaagttatcggaaacatcaagaatccgatcccacttctgcatgtacaacatcatccagagaagaacgtgtattaaatagaatatttaactcgcaaaatcgttaagaagtttaagcgacgatccgcatgctgcgcaggccagtgtattacccctcatagtattaatataatccaatgatacttttgtgatgtcggaaatcttaaccaatttagactgacaggcagaacacgtcatgcaatcatcatcgtcatcgataactgtagtcttgggcttctttttgcgactcttcattccggaacgcacattggtgctatccatttaggtagtaaaaaataagtcagaatatgccctataacacgatcgtgcaaaacctggtatatcgtctctatctttatcacaatatagtgtatcgacatttttattattattgacctcgtttatcttggaacatggaatgggaacatttttgttatcaacggccatctttgccttaattccagatgttgtaaaattataactaaacagtctatcatcgacacaaatgaaattcttgtttagacgtttgtagtttacgtatgcggctcgttcgcgtctcattttttcagatattgcaggtactataatattaaaaataagaatgaaataacataggattaaaaataaagttatcatgacttctagcgctgatttaactaacttaaaagaattacttagtctgtacaaaagtttgagattttcagattctgcggctatagaaaagtataattctttggtagaatggggaacatctacttactggaaaataggcgtgcaaaaggtagctaatgtcgagacgtcaatatctgattattatgatgaggtaaaaaataaaccgtttaatattgatccgggctattacattttcttaccggtatattttgggagcgtctttatttattcgaagggtaaaaatatggtagaacttggatctggaaactcttttcaaataccagatgatatgcgaagtgcgtgtaacaaagtattagacagcgataacggaatagactttctgagatttgttttgttaaacaatagatggataatggaagatgctatatcaaaatatcagtctccagttaatatatttaaactagctagtgagtacggattaaacatacccaaatatttagaaattgaaatagaggaagacacattatttgacgacgagttatactctattatagaacgctctttcgatgataaatttccaaaaatatccatatcgtatattaagttgggagaacttagacggcaagttgtagactttttcaaattctcattcatgtatattgagtccatcaaggtagatcgtataggagataatatttttattcctagcgttataacaaaatcaggaaaaaagatattagtaaaagatgtagaccatttaatacgatccaaggttagagaacatacatttgtaaaagtaaaaaagaaaaacacattttccattttatacgactatgatggaaacggaacagaaactagaggagaagtaataaaacgaattatagacactataggacgagactattatgttaacggaaagtatttctctaaggttggtagtgcaggcttaaagcaattgactaataaattagatattaatgagtgcgcaactgtcgatgagttagttgatgagattaataaatccggaactgtaaaacgaaaaataaaaaaccaatcagcatttgatttaagcagagaatgtttgggatatccagaagcggattttataacgttagttaataacatgcggttcaaaatagaaaattgtaaggttgtaaatttcaatattgaaaatactaattgtttaaataacccgagtattgaaactatatatggaaactttaaccagttcgtctcaatctttaatgtcgtcaccgatgtcaaaaaaagattattcgagtgaaataatatgcgcctttgatataggtgcaaaaaatcctgccagaactgttttagaagtcaaggataactccgttagggtattggatatatcaaaattagactggagttctgattgggaaaggcgcatagctaaagatttgtcacaatatgaatacactacagttcttctagaacgtcagcctagaaggtcgccgtatgttaaatttatctattttattaaaggctttttatatcatacatcggctgccaaagttatttgcgtctcgcctgtcatgtctggtaattcatatagagatcgaaaaaagagatcggtcgaagcatttcttgattggatggacacattcggattgcgagactccgttccggatagacgcaaattagacgatgtagcggatagtttcaatttggctatgagatacgtattagataaatggaatactaattatacaccttataataggtgtaaatctagaaattacataaaaaaaatgtaataacgttagtaacgccattatggataatctatttacctttctacatgaaatagaagatagatatgccagaactatttttaactttcatctaataagttgcgatgaaataggagatatatatggtcttatgaaagaacgcatttcctcagaggatatgtttgataatatagtgtataataaagatatacatcctgccattaagaaactagtgtattgcgacatccaacttactaaacacattattaatcagaatacgtatccggtatttaacgattcttcacaagtgaaatgttgtcattatttcgacataaactcagataatagcaatattagctctcgtacagtagagatatttgagagggaaaagtcatctcttgtatcatatattaaaactaccaataagaagagaaaggtcaattacggcgaaataaagaaaactgttcatggaggcactaatgcaaattacttttccggtaaaaagtctgacgagtatctgagtactacagttagatccaacattaatcaaccttggatcaaaaccatctctaagaggatgagagttgatatcattaatcactctatagtaacgcgtggaaaaagctctatattacaaactatagaaattatttttactaatagaacatgtgtgaaaatattcaaggattctactatgcacattattctatccaaggacaaggatgaaaaggggtgtatacacatgattgacaaattattctatgtctattataatttatttctgttgttcgaagatatcatccaaaacgagtactttaaagaagtagctaatgttgtaaaccacgtactcacggctacggcattagatgagaaattattcctaattaagaaaatggctgaacacgatgtttatggagttagcaatttcaaaatagggatgtttaacctgacatttattaagtcgttggatcataccgttttcccctctctgttagatgaggatagcaaaataaagttttttaaggggaaaaagctcaatattgtagcattacgatctctggaggattgtataaattacgtgactaaatccgagaatatgatagaaatgatgaaggaaagatcgactattttaaatagcatagatatagaaacggaatcggtagatcgtctaaaagaattgcttctaaaatgaaaaaaaacactaattcagaaatggatcaacgactagggtataagtttttggtgcctgatcctaaagccggagttttttatagaccgttacatttccaatatgtatcgtattctaattttatattgcatcgattgcatgaaatcttgaccgtcaagcggccactcttatcgtttaagaataatacagaacgaattatgatagaaattagcaatgttaaagtgactcctccagattactcacctataatcgcgagtattaaaggtaagagttatgacgcattagccacgttcactgtaaatatctttaaagaggtaatgaccaaagagggtatatccatcactaaaataagtagttatgagggaaaagattctcatttgataaaaattccgctactaataggatacgggaataaaaatccacttgatacagccaagtatcttgttcctaatgtcataggtggagtctttatcaataaacaatctgtcgaaaaagtaggaattaatctagtagaaaagattacaacatggccaaaatttagggttgttaagccaaactcattcactttctcgttttcctccgtatcccctcctaatgtattaccgacaagatatcgccattacaagatatctctggatatatcacaattggaagcgttgaatatatcatcgacaaagacatttataacggtcaatattgttttgctgtctcaatatttatctagagtgagtctagaattcattagacgtagtttatcatacgatatgcctccagaagttgtctatctagtaaacgcgataatagatagtgctaaacgaattactgaatctattactgactttaatattgatacatacattaatgacctggtggaagctgaacacattaaacaaaaatctcagttaacgatcaacgagttcaaatatgaaatgctgcataactttttacctcatatgaactatacacccgatcaactaaagggattttatatgatatctttactaagaaagtttctctactgtatcttccacacttctagatatccagatagagattcgatggtttgtcatcgcatcctaacgtacggcaaatattttgagacgttggcacatgatgaattagagaattacataggcaacatccgaaacgatatcatgaacaatcacaagaacagaggcacttacgcggtaaacattcatgtactaacaactcccggacttaatcacgcgttttctagcttattgagtggaaagttcaaaaagtcagacggtagttatcgaacacatcctcactattcatggatgcagaatatttctattcctaggagtgttggattttatccggatcaagtaaagatttcaaagatgttttctgtcagaaaataccatccaagtcaatatctttacttttgttcatcagacgttccggaaagaggtcctcaggtaggtttagtatctcaattgtctgtcttgagttccattacaaatatactaacgtctgagtatttggatttggaaaagaaaatttgtgagtatatcagatcatattataaagatgatataagttactttgaaacaggatttccaatcactatagaaaatgctctagtcgcatctcttaatccaaatatgatatgtgattttgtaactgactttagacgtagaaaacggatgggattcttcggtaacttggaggtaggtattactttagttagggatcacatgaatgaaattcgcattaatattggagcgggaagattagtcagaccattcttggttgtggataacggagagctcatgatggatgtgtgtccggagttagaaagcagattagacgacatgacattctctgacattcagaaagagtttccgcatgtcatcgaaatggtagatatagaacaatttacttttagtaacgtatgtgaatcggttcaaaaatttagaatgatgtcaaaggatgaaagaaagcaatacgatttatgtgactttcctgccgaatttagagatggatatgtagcatcttcattagtgggaatcaatcacaattctggacccagagctattcttggatgtgctcaagctaaacaagctatctcttgtctgagctcggatatacgaaataaaatagacaatggaattcatttgatgtatccagagaggccaatcgtgattagtaaggctttagaaacttcaaagattgcggctaattgcttcggccaacatgttactatagcattaatgtcgtacaaaggtatcaatcaagaggatggaattatcatcaaaaaacaatttattcagagaggcggtctcgatattgttacagccaagaaacatcaagtagaaattccattggaaaactttaataacaaagaaagagataggtctaacgcctattcaaaattagaaagtaatggattagttagactgaatgctttcttggaatccggagacgctatggcacgaaatatctcatcaagaactcttgaagatgattttgctagagataatcagattagcttcgatgtttccgagaaatataccgatatgtacaaatctcgcgttgaacgagtacaagtagaacttactgacaaagttaaggtacgagtattaaccatgaaagaaagaagacccattctaggagacaaatttaccactagaacgagtcaaaagggaacagtcgcgtatgtcgcggatgaaacggaacttccatacgacgaaaatggtatcacaccagatgtcattattaattctacatccatcttctctagaaaaactatatctatgttgatagaagttattttaacagccgcatattctgctaagccgtacaacaataagggagaaaaccgacctgtctgttttcctagtagtaacgaaacatccatcgatacatatatgcaattcgctaaacaatgttatgagcattcaaatccgaaattgtccgatgaagaattatcggataaaatcttttgtgaaaagattctctatgatcctgaaacggataagccttatgcatccaaagtattttttggaccaatttattacttgcgtctgaggcatttaactcaggacaaggcaaccgttagatgtagaggtaaaaagacgaagctcattagacaggcgaatgagggacgaaaacgtggaggaggtatcaagttcggagaaatggagagagactgtttaatagcgcatggtgcagccaatactattacagaagttttgaaagattcggaagaagattatcaagatgtgtatgtttgtgaaaattgtggagacatagcagcacaaatcaagggtattaatacatgtcttagatgttcaaaacttaatctctctcctctcttaacaaaaattgataccacgcacgtatctaaagtatttcttactcaaatgaacgccagaggcgtaaaagtcaaattagatttcgaacgaaggcctccttcgttttataaaccattagataaagttgatctcaagccgtcttttctggtgtaatattctagtttggtagtagatacatatcaatatcatcaaattcgagatccgaattataaaatgggcgtggattgttaactatagaatcggacgtctgatattcgaaaatctgtggagtttcaggttttggtggaggtgtaactgctacttgggatactgaagtctgatattcagaaagctgtggatgttctggttcggcatccaccgatggtgtcacatcactaatcggttcggtaacgtctgtggatggaggtgctacttctacagaacctgtagcctcagttgtcaacggagatacatttttaatgcgagaaaatgtataatttggtaatggtttcttatgtggatctgaagaagaggtaagatatctactagaaagataccgatcacgttctagttctcttttgtagaacttaactttttctttctccgcatctagttgatattccaacctcttcacgttactacgttcagattccaattcacgttcgcatgggttacctccgcagtttttacgagcgatttcacgttcagccttcatgcgtctctccctctctctatcgagtttatcagagcagtctttctgaaggcgatcgaactccataaatttctccaacgctttgattgtttccatagatttccgaagttcagcttttaggactgtgattctttttctttcgaattcacagctggatgtacaaccgtttccattaccgccatctctaagtttcttttctagatcggcaacatttcatccccatgccttttacattcctcgagtctactgtcgtcgaaatatcgttccagctccttttcgacatcaataactttagcacgttgtctctcaagctctcttttgtagttatctgattccctggcacgtttaagatcttcatgcaattgagtcagctcttaacttcctctcttgcttcttcgtcatagtacgcgcaatcactgtgagatccattgttaccacgtctacactcggcgagctcgcgtttaagagattcaatttcccgtttgtattggtccatgtttccattgctaccaccattagatttacaggctgctagttgtcgttcgagatcagaaatacgggttttcttggaattgatttcgtcgatgtacttggcatcgaaacacttattaagttctttttccaattctacgattttatttctttcgcgagtcaattccctcctgtagtaactatctgttttgtcagattcacgctctctacgtagactttcttgcaagttactaatttgttccctagcacgtccgagtttagttttatatgctgaatagagttctgattcatcctttgagcagatctctagcgatcgtttaagattcctaattctagtctttagcctatttacctcctcagaagatgttccgttaccgttgcgtttacactcgttaagctgtctatcaagatccatgattctatctctaagacgttgcatctctctttccatatcagcattgctttcattattacgtctgcagtcactcaactgtctttcaatatctgagattctatctctaagacgtcgcatctctctctgtttcggcattggtttcattattacgtttacagtcgttcaactgtctttcaagatctgatattctagattggagtctgctaatctctgtagcattttcacggcattcactcagttgtctttcaagatctgaaattttagattggagtctgctaatctctgtaagatttcctcctccgctctcgatgcagtcggtcaacttattctctagttctctaatacgcgaacgcagtgcatcaacttcttgcgtgtcttcctggttgcgtgtacattcatcgagatctctaacgcgtcgtcgttcttcctcaagttctctgcgtactacagaaagcgtgtccctatcttgttgatatttagcaatttctgattctagagtactgattttgcttacgtagttactaatagttgtcttggccttatcaagatcctccttgtatttgtcgcattccttgatatccctacgaagtctggacagttcccattcgacattacgacgtttatcgatttcagctcggagatcgtcatcgcgttgttttagccacatacgactgagttcaagttctcgttgacaagatccatctacttttccattcctaatagtatccagttccttttctagttctgaacgcatttctcgttccctatcaagcgattctctcaattctcggatagtcttcttatcaatttctaataaatctgaaccatcatctgtcccattttgaatatccctgtgttctttgatctcttttgtaagtcggtcgattctttcggttttataaacagaatccctttccaaagtcctaatcttactgagtttatcactaagttctgcattcaattcggtgagttttctcttggcttcttccaactctgttttaaactctccactatttccgcattcttcctcgcatttatctaaccattcaattagtttattaataactagttggtaatcagcgattcctatagccgttcttgtaattgtgggaacataattaggatcttctaatggattgtatggcttgatagcatcatctttatcattattagggggatggacaaccttaattggttggtcctcatctcctccagtagcgtgtggttcttcaataccagtgttagtaataggcttaggcaaatgcttgtcgtacgcgggcacttcctcatccatcaagtatttataatcgggttctacttcagaatattcttttctaagagacgcgacttcgggagttagtagaagaactctgtttctgtatctatcaacgctggaatcaatactcaagttaaggatagcgaatacctcatcgtcatcatccgtatcttctgaaacaccatcatatgacatttcatgaagtctaacgtattgataaatagaatcagatttagtattaaacagatccttaacctttttagtaaacgcatatgtatattttagatctccagatttcataatatgatcacatgccttaaatgtcagtgcttccatgatataatctggaacactaatgggtgacgaaaaagatacagcaccatatgctacgttgataaataaatctgaaccactaagtagataatgattaatgttaagaaagaggaaatattcagtgtataggtatgtcttggcgtcatatcttgtactaaacacgctaaacagtttgttaatgtgatcaatttccaatagattaattagagcagcgggaataccaacaaacatattaccacatccgtattttctatgaatatcacatatcatgttaaaaaatcttgatagaagagcgaatatctcgtctgacttaatgagtcgtagttcagcagcaacataagtcataactgtaaatagaacatactttcctgtagtgttgattctagactccacatcaacaccattattaaaaatagttttatatacatctttaatctgctctccgttaatcgtcgaacgttctagtatacggaaacactttgatttcttatctgtagttaatgacttagtgatatcacgaagaatattacgaattacatttcttgtttttcttgagagacctgattcagaactcaactcatcgttccatagtttttctacctcagtggcgaaatctttggagtgcttggtacatttttcaataaggttcgtgacctccatttattataaaaaatttattcaaaacttaactacaatcgggtaattataagatcgtagatctcccatgtggcggaatactaccatctatcgcatgtggatggacagtaggtaatggccatgggaacagtaatgtttgcatatttatctttcttgctagtattactgcatattgtcccaatgtttcgatgtgatgttctaacctatcaactgccgctgtatcacaacaatagtgtccgatgaaattaagattatgatccaatgtgtttaatatatgattatcaagtcttatacgatccgcgtcttttttgacaggatcaggttcttctacaggaagaagtttcggcctcttatgatattcatgtctgggaaacggtggtctagggtgaggctccggtatcggagtgggttttggattataatcatcatcgtctatgacatcatcttcgacttcgatatttattttgctatcttgatgatgtcctgtatcagttgcattttcagcactcgactgaatattagcgcattcattgtctattattaccatatttctaaacccaaaatgtatgtgttgaacatcagtactatcgttgatgagtcttatagcatgaattcgcttatcgttatcgggtttatcttctgtcaccttagcaattccttttttattaaactctacataatcatatccatttctattgtttgttctaatataaacgagtatagcatcattgctaaatttttcaatagtatcaaaaacagaatatcctaaaccatataatatatattcaggaacactcaaactaaatgtccaggattctcctaaatacgtaaactttaatagtgcgaaatcattcaaaaatctaccacttatagatagatagtacataaatgcgtatagtagtctacctatctctttattatgaaaaccggcattacgatcatatatgtcgtgatatacctgtgatccgtttacgttaaaccataaatacatgggtgatcctataaacatgaatttatttctaattctcagagctatagttaattgaccgtgtaatatttgcttacatgcatacttgatacgcttattaataagatttttatcattgctcgttatttcagaatcgtatatataaggagtaccatcgtgattcttaccagatattatacaaaatactatatataaaatatattgacccacgttagtaatcatataaatgtttaacgttttaaattttgtattcaatgatccattatcatacgctatcatggtcttgtaatattcattctttaaaatataatattgtgttagccattgcattggagctcctaatggagattttctattctcatccattttaggataggctttcataaagtccctaataacttcgtgaataatgtttctatgttttctactgatgcatgtatttgcttcgatttttttatcccatgtttcatctatcatagatttaaacgcagtaatgctcgcaacattaacatcttgaaccgttggtacaattccgttccataaatttataatgttcgccatttatataactcattttttgaatatacttttaattaacaaaagagttaagttactcatatggacgccgtccagtctgaacatcaatctttttagccagagatatcatagccgctcttagagtttcagcgtgattttccaacctaaatagaacttcatcgttgcgtttacaacacttttctatttgttcaaactttgttgttacattagtaatctttttttccaaattagttagccgttgtttgagagtttcctcattgtcgtcttcatcggctttaacaattgcttcgcgtttagcctctggctttttagcagcctttgtagaaaaaaattcagttgctggaattgcaagatcgtcatctccggggaaaagagttccgtccatttaaagtacagattttagaaactgacactctgcgttatttatatttggtacaacacatggattataaatattgatgttaataacatcagaaaatgtaaagtctatacattgttgcatcgtgttaaattttctaatggatctagtattattgggtccaacttctgcctgaaatccaaatatggaagcggatacaaaaccgtttcctggataaaccacacatctccacttttgctttacatcagaaattgtgtcgttgacatcttgaactctcctatctaatgccggtgttccacctatagattttgaatattcgaatgctgcatgagtagcattaaattccttaatattgccataattttcatatattgagtaaccctggataaaaagtaaacacaccgcagccgtcgctaccacaataaaaaaaattgatagagagttcatttataatctattagaagctgacaaaatttttttacacgcatcagacaatgctttaataaatagttcaacatctacttttgtcatatcgaaccgatggtatgattctaacctagaattacatccgaaaaagttgactatgttcatagtcattaagtcattaacaaacaacattccagactctggattataagacgatactgtttcgtcacaattacctaccttaatcatgtgattatgaatattggctattagagcaccttctaagaaatctataatatctttgaaacacgatttaaaatcaaaccacgaatatacttctacgaagaaagttagtttacccataggagaaataactataaatggagatctaaatacaaaatccggatctatgatagttttaacattattatattctctattaaatacctccacatctaaaaatgttaattttgaaactatgtcttcgtttattaccgtacctgaactaaacgctataagctctattgtttgagaactctttaaacgatattcttgaaatacatgtaacaaagtttcctttaactcggtcggtttatctaccatagttacagaatttgtatccttatctataatataataatcaaaatcgtataaagttatataattatcgcgttcagattgtgatcttttcaaatagactaaaaaccccatttctctagtaagtatcttatgtatatgtttgtaaaatatcttcatggtgggaatatgctctaccgcagttagccattcctcattgacagcggtagatgtattagacaaaactattccaatgtttaacaagggccattttacgagattattaaatccttgtttgataaatgtagccaatgagggttcgagttcaacgacgattgaattctcttcccgcggatgctgcatgatgaacgacgggatgttgttcgattgatttggaattctttttcgactttttgtttatattaaatattttaaaatttatagcggatagcaattcatgtaccacggataatgtagacgcgtattgcgcatcgatatctttattattagataaatttatcaataaatgtgagaagtttgcctcgttaaggtcttccatttaaatattatataaacatttgtgtttgtatcttattcgtcttttatggaatagttttttactagtaaagctgcaattacacactttgtccgtaaaacataaatataaacaccagcttttatcaatcgttccaaaaagtcgacggcggacatttttaacatggcatctattttaaatacacttaggtttttggaaaaaacatcattttataattgtaacgattcaataactaaagaaaagattaagattaaacataagggaatgtcatttgtattttataagccaaagcattctaccgttgttaaatacttgtctggaggaggtatatatcatgatgatttggttgtattggggaaggtaacaattaataatctaaagatgatgctattttacatggatttatcatatcatggagtgacaagtagtggagcaatttacaaattgggatcgtctatcgatagactttctctaaataggactattgttacaaaagttaataattatgatgatacattttttgacgacgatgattgatcgctattgcacaattttgtttttgtactttctaatatagtgtttaggttctttttcatatgagaatattgatttactaaaatatctatgtttaacttttgttctatgacgtccttatcggcggtatcggtacatatacgtaattcaccttcacaaaatacggagtcttcgataataatagccaatcgattattggatctagctgtctgtatcatattcaacatgtttaatatatcctttcgtttcccctttacaggcatcgatcgtagcatattttccgcgtctgatatggaaatgttaaaactacaaaaatgcgtaatgttagcccgtcctaatattggtacgtgtctataagtttggcatagtagaataatagacgtgtttaaatgccttccaaagtttaagaattctattagagtattgcattttgatagtttatcgcctacatcatcaaaaataagtaaaaagtgtgctgattttttatgattttgtgcgacagcaatacatttttctatgttacttttagttcgtatcagattatattctagagattcctgactactaacgaaattaatatgatttggccaaatgtatccatcataatctgggttataaacgggtgtaaacaagaatatatgtttatattttttaactagtgtagaaaacagagatagtaaatagatagtttttccagatccagatcctcctgttaaaaccattctaaacggcatttttaataaattttctcttgaaaattgtttttcttggaaacaattcataattatatttacagttactaaattaatttgataataaatcaaaatatggaaaactaaggttgttagtagggaggagaacaaagaaggcacatcgtgatataaataacatttattatcatgatgacaccagaaaacgacgaagagcagacatctgtgttctccgctactgtttacggagacaaaattcagggaaagaataaacgcaaacgcgtgattggtctatgtattagaatatctatggttatttcactactatctatgattaccatgtccgcgtttctcatagtgcgcctaaatcaatgcatgtctgctaacgaggctgctattactgacgccgctgttgccgttgctgctgcatcatctactcatagaaaggttgcgtctagcactacacaatatgatcacaaagaaagctgtaatggtttatattaccagggttcttgttatatattacattcagactaccagttattctcggatgctaaagcaaattgcactgcggaatcatcaacactacccaataaatccgatgtcttgactacctggctcattgattatgttgaggatacatggggatctgatggtaatccaattacaaaaactacatccgattatcaagattctgatgtatcacaagaagttagaaagtatttttgtgttaaaacaatgaactaatatttatttttgtacattaataaatgaaatcgcttaatagacaaactgtaagtaggtttaagaagttgtcggtgccggccgctataatgatgatactctcaaccattattagtggcataggaacatttctgcattacaaagaagaactgatgcctagtgcttgcgccaatggatggatacaatacgataaacattgttatttagatactaacattaaaatgtctacagataatgcggtttatcagtgtcgtaaattacgagctagattgcctagacctgatactagacatctgagagtattgtttagtattttttataaagattattgggtaagtttaaaaaagaccaatgataaatggttagatattaataatgataaagatatagatattagtaaattaacaaattttaaacaactaaacagtacgacggatgctgaagcgtgttatatatacaagtctggaaaactggttaaaacagtatgtaaaagtactcaatctgtactatgtgttaaaaaattctacaagtgacaacaaaaaatgaattaataataagtcgttaacgtacgccgccatggacgccgcgtttgttattactccaatgggtgtgttgactataacagatacattgtatgatgatctcgatatctcaatcatggactttataggaccatacattataggtaacataaaaactgtccaaatagatgtacgggatataaaatattccgacatgcaaaaatgctactttagctataagggtaaaatagttcctcaggattctaatgatttggctagattcaacatttatagcatttgtgccgcatacagatcaaaaaataccatcatcatagcatgcgactatgatatcatgttagatatagaagataaacatcagccattttatctattcccatctattgatgtttttaacgctacaatcatagaagcgtataacctgtatacagctggagattatcatctaatcatcaatccttcagataatctgaaaatgaaattgtcgtttaattcttcattctgcatatcagacggcaatggatggatcataattgatgggaaatgcaatagtaattttttatcataaaagttgtaaagtaaataataaaacaataaatattgaactagtagtacgtatattgagcaatcagaaatgatgctggtacctcttatcacggtgaccgtagttgcgggaacaatattagtatgttatatattatatatttgtaggaaaaagatacgtactgtctataatgacaataaaattatcatgacaaaattaaaaaagataaagagttctaattccagcaaatctagtaaatcaactgatagcgaatcagactgggaggatcactgtagtgctatggaacaaaacaatgacgtagataatatttctaggaatgagatattggacgatgatagcttcgctggtagtttaatatgggataacgaatccaatgttatggcgcctagcacagaacacatttacgatagtgttgctggaagcacgctgctaataaataatgatcgtaatgaacagactatttatcagaacactacagtagtaattaatgaaacggagactgttgaagtacttaatgaagataccaaacagaatcctaactattcatccaatcctttcgtaaattataataaaaccagtatttgtagcaagtcaaatccgtttattacagaacttaacaataaatttagtgagaataatccgtttagacgagcacatagcgatgattatcttaataagcaagaacaagatcatgaacacgatgatatagaatcatcggtcgtatcattggtgtgattagtttcctttttataaaattgaagtaatatttagtattattgctgccgtcacgttgtacaaatggagatattccctgtattcggcatttctaaaattagcaattttattgctaataatgactgtagatattatatagatacagaacatcaaaaaattatatctgatgagatcaatagacagatggatgaaacggtacttcttaccaacatcttaagcgtagaagttgtaaatgacaatgagatgtaccatcttattcctcatagattatcgacgattatactctgtattagttctgtcggaggatgtgttatctctatagataatgacatcaatggcaaaaatattctaacctttcccattgatcatgctgtaatcatatccccactgagtaaatgtgtcgtagttagcaagggtcctacaaccatattggttgttaaagcggatatacctagcaaacgattggtaacatcgtttacaaacgacatactatatgtaaacaatctgtcactgattaattatttgccgttgtctgtattcattattagacgagtcaccgactatttggatagacacatatgcgatcagatatttgctaataataagtggtattcccttataaccatcgacgataagcaatatcctattccatcaaactgtataggtatgtcctctgccaagtacataaattctagcatcgagcaagatactttaatccatgtttgtaacctcgagcatccgttcgactcagtatacaaaaaaatgcagtcgtacaattctctacctatcaaggaacaaatattgtacggtagaattgataatataaatatgagcattagtatttctgtggattaatagatttctagtatggggatcattaatcatctctaatctctaaatacctcataaaacgaaaaaaaagctattatcaaatactgtacggaatggattcattctcttctctttttatgaaactctgttgtatatctactgataaaactggaagcaaaaaatctgatagaaagaataagaataagatcaaggattatatggaacacgattattataaaataacaatagttcctggttcctcttccacgtctactagctcgtggtattatacacatgcctagtaatagtctctttgcgttgacggaaagcagactagaaataacaggctaaaatgttcagacaccataatagttcccaacccagataataacagagttccatcaacacattcctttaaactcaatcccaaacccaaaaccgttaaaatgtatccggccaattgatagtagataatgaggtgtacagcgcatgataatttacacagtaaccaaaatgaaaatactttagtaattataagaaatatagacggtaatgtcatcatcaacaatccgataatatgcctgagagtaaacattgacggataaaacaaaaatgctccgcataactctatcatggcaataacacaaccaaatacttgtaagattcctaaattagtagaaaatacaacgaatatcgatgtataagtgatctcgagaaataataagaataaagtaatgcccgtaaagataaacatcaacattgtttggtaatcattaaaccaattagtatgaagttgaactaatttcacagtagattttattccagtgttatcctcgcatgtataagtacctggtaagatatctttatattccataatcaatgagacatcactatctgataacgaatgaagtctagcactagtatgccatttacttaatattgtcgtcttggaagttttattataagttaaaatatcatggttatccaatttccatctaatatactttgtcggattatctatagtacacggaataatgatggtatcattacatgctgtatactctatggtctttgtagttgttataacaaccaacgtatagaggtatatcaacgatattctaactcttgacattttttatttatttaaaatgatacctttgttatttattttattctattttgctaacggtattgaatggcataagtttgaaacgagtgaagaaataatttctacttacttattagacgacgtattatacacgggtgttaatggggcggtatacacattttcaaataataaactaaacaaaactggtttaactaataataattatataacaacatctataaaagtagaggatgcggataaggatacattagtatgcggaaccaataacggaaatcccaaatgttggaaaatagacggttcagacgacccaaaacatagaggtagaggatacgctccttatcaaaatagcaaagtaacgataatcagtcacaacggatgtgtactatctgacataaacatatcaaaagaaggaattaaacgatggagaagatttgacggaccatgtggttatgatttattcacggcggataacgtaattccaaaagatggtttacgaggagcattcgtcgataaagacggtacttatgacaaagtttacattcttttcactgatactatcggctcaaagagaattgtcaaaattccgtatatagcacaaatgtgcctaaacgacgaaggtggtccatcatcattgtctagtcatagatggtcgacgtttctcaaagtcgaattagaatgtgatatcgacggaagaagttatagacaaattattcattctagaactataaaaacagataatgatacgatactatatgtattcttcgatagtccttattccaagtccgcattatgtacctattctatgaataccattaaacaatctttttctacgtcaaaattggaaggatatacaaagcaattgccgtctccagctcctggtatatgtttaccagctggaaaagttgttccacataccacgtttgaagtcatagaacaatataatgtactagatgatattataaagcctttatctaaccaacctatcttcgaaggaccgtctggtgttaaatggttcgatataaaggagaaggaaaatgaacatcgggaatatagaatatacttcataaaagaaaattctatatattcgttcgatacaaaatctaaacaaactcgtagctcgcaagtcgatgcgcgactattttcagtaatggtaactgcgaaaccgttatttatagcagatatagggataggagtaggaatgccacaaatgaaaaaaatacttaaaatgtaatcttaatcgagtacaccacacgacaatgaacaaacataagacagattatgctggttatgcttgctgcgtaatatgcggtctaattgtcggaattatttttacagcgacactattaaaagttgtagaacgtaaattagttcatacaccattaatagataaaacgataaaagatgcatatattagagaagattgtcctactgactggataagctataataataaatgtatccatttatctactgatcgaaaaacctgggaggaaggacgtaatgcatgcaaagctctaaattcaaattcggatctaattaagatagagactccaaacgagttaagttttttaagaagccttagacgaggctattgggtaggagaatccgaaatattaaaccagacaaccccatataattttatagctaagaatgccacgaagaatggaactaaaaaacggaaatatatttgtagcacaacgaatactcccaaactgcattcgtgttacactatataacaattacactacatttttatcataccactacttcggttagatgttttagaaaaaaataaatatcgccgtaccgttcttgtttttataaaaataacaattaacaattatcaaattttttctttaatattttacgtggttgaccattcttggtggtaaaataatctcttagtgttggaatggaatgctgtttaatgtttccacactcatcgtatattttgacgtatgtagtcacatcgtttacgcaatagtcagactgtagttctatcatgcttcctacatcagaaggaggaacagttttaaagtctcttggttttaatctattaccgttagttttcatgaaatcctttgttttatccacttcacattttaaataaatgtccactatacattcttttgttaattttactagatcgtcatgggtcatagaatttataggttccgtagtccatggatccaaactagcaaacttcgcgtatacggtatcgcgattagtgtatacaccaactgtatgaaaattaagaaaacagtttaataaatcaacagaaatatttaatcctccgtttgatacagatgcgccatatttatggatttcggattcacacgttgtttgtctgaggtgttcgtctagtgttgcttctacgtaaacttcgattcccatatattctttattgtcagaatcgcataccgatttatcatcatacactgtttgaaaactaaatggtatacacatcaaaataataaataataacgagtacattctgcaatattgttatcgtaattggaaaaatagtgttcgagtgagttggattatgtgagtattggattgtatattttattttatattttgtaataagaataaaatgctaatgtcaagtttattccaatagatgtcttattaaaaacatatataataaataacaatggctgaatggcataaaattatcgaggatatctcaaaaaataataagttcgaggatgccgccatcgttgattacaagactacaaagaatgttctagctgctattcctaacagaacatttgccaagattaatccgggtgaaattattcctctcatcactaatcgtaatattctaaaacctcttattggtcagaaatattgtattgtatatactaactctctaatggatgagaacacgtatgctatggagttgcttactgggtacgcccctgtatctccgatcgttatagcgagaactcataccgcacttatatttttgatgggtaagccaacaacatccagacgtgacgtgtatagaacgtgtagagatcacgctacccgtgtacgtgcaactggtaattaaaataaaaagtaatattcatatgtagtgtcaattttaaatgatgatgatgaaatggataatatccatattgacgatgtcaataatgccggtattggcatacagttcatcgatttttagatttcattcagaggatgtggaattatgttatgggcatttgtattttgataggatctataatgtagtaaatataaaatataatccgcatattccatatagatataattttattaatcgcacgttaaccgtagatgaactagacgataatgtcttttttacacatggttattttttaaaacacaaatatggttcacttaatcctagtttgattgtctcattatcaggaaacttaaaatataatgatatacaatgctcagtaaatgtatcgtgtctcattaaaaatttggcaacgagtacatctactatattaacatctaaacataagacttattctctacatcggtccacgtgtattactataataggatacgattctattatatggtataaagatataaatgacaagtataatgacatctatgattttactgcaatatgtatgctaatagcgtctacattgatagtgaccatatacgtgtttaaaaaaataaaaatgaactcttaattatgctatgctattagaaatggataaaatcaaaattacggttgattcaaaaattggtaatgttgttaccatatcgtataacttggaaaagataactattgatgtcacacctaaaaagaaaaaagaaaaggatgtattattagcgcaatcagttgctgtcgaagaggcaaaagatgtcaaggtagaagaaaaaaatattatcgatattgaagatgacgatgatatggatgtagaaagcgcgtaatacgatctataaaaataagtatataaatactttttatttactgtactcttactgtgtagtggtgataccctactcgattatttttttaaaaaaaaaatacttattctgattcttctagccatttccgtgttcgtttgaatgccacatcgacgtcaaagataggggagtagttgaaatctagttctgcattgttggtacgcacctcaaatgtagtgttggatatcttcaacgtatagttgttgagtagtgatggttttctaaatagaattctcttcatatcattcttgcacgcgtacatttttagcatccatcttggaatcctagatccttgttctattcccaatggtttcatcaatagaagattaaacatatcgtacgaacacgatggagagtaatcgtagcaaaagtaagcatttcctttaatcttagatcccggatactggatatattttgcagccaacacgtgcatccatgcagcatttcctacatatacccggctatgcaccgcgtcatcatcgactgtacgatacataatgttaccgtgttgcttacattgctcgtaaaagactttcatcaatttgtctccttctccgtaaattccagtgggtcttaggcaacaagtatacaattttgctccattcatgattacggaattattggctttcataaccagttgctcggccatacgtttactttttgcgtatacatgtcctggtgatatatcataaagggtatgctcatggccgatgaatggatcaccgtgtttattgggtcctattgcttccatgctactagtatagatcaaatacttgattcctaggtccacacaagctgccaaaatagtctgtgttccataatagtttactttcatgatttcattatcggtgtattttccaaatacatccactagagcagccgtatgaataatcagatttaccccatctagcgcttctctcaccttatcaaagtcgtttatatcacattgtatatagtttataaccttaactttcgaggttattggttgtggatcttctacaatatctatgactctgatttcttgaacatcatctgcactaattaacagttttactatatacctgcctagaaatccggcaccaccagtaaccgcgtacacggccattgctgccactcataatatcagactacttattctattttactaaataatggctgtttgtataatagaccacgataatatcagaggagttatttactttgaaccagtccatggaaaagataaagttttaggatcagttattggattaaaatccggaacgtatagtttgataattcatcgttacggagatattagtcaaggatgtgattccataggcagtccagaaatatttatcggtaacatctttgtaaacagatatggtgtagcatatgtttatttagatacagatgtaaatatatttacaattattggaaaggcgttatctatttcaaaaaatgatcagagattagcgtgtggagttattggtatttcttacataaatgaaaagataatacattttcttacaattaacgagaatggcgtttgatatatcagttaatgcgtctaaaacaataaatgcattagtttacttttctactcagcaaaataaattagtcatacgtaatgaagttaatgatacacactacactgtcgaatttgatagggacaaagtagttgacacgtttatttcatataatagacataatgacaccatagagataagaggggtgcttccagaggaaactaatattggttgcgcggttagtatgacttacttgtataataagtatagttttaaactgattttagcagaatatataagacacagaaatactatatccggcaatatttattcggcattgatgacactagatgatttggctattaaacagtatggagacattgatctattatttaatgagaaacttaaagtagactccgattcgggactatttgactttgtcaactttgtaaaggatatgatatgttgtgattctagaatagtagtagctctatctagtctagtatctaaacattgggaattgacaaataaaaaatataggtgtatggcattagccgaacatatatctgatagtattccaatatctgagctatctagactacgatacaatctatgtaagtatctacgcggacacactgagagcatagaggataaatttgattattttgaagacgatgattcgtctacatgttctgccgtaaccgacagggaaacggatgtataattttttttatagcgtgaaggatatgataaaaaatataattgttgtatttatcccattccaatcaccttatatgattctgtaacacaataaaggagtcttatagatgtatagaggtcagatactggtttgataaactgtttattccacataagtatgtttgactttatggttagacccgcatactttaacaaatcactgaaaattggagttaggtattgacctctcagaatcagttgccgttctggaacattaaatgtattttttatgatatactccaacgcatttatgtgggcatacaacaagtcattactaatggaatattccaagagttttagttgtctagtatttaacaagagaagagatttcaacagactgtttatgaactcgaatgccgcctcattgtcgcttatattgatgatgtcgaattctcccaatatcatcaccgatgagtagctcatcttgttatcgggatccaagttttctaaagatgtcattaaaccctcgatcatgaatggatttatcatcatcgtttttatgttggacatgagcttagtccgtttgtccacatctatagaagatgatttctgaattatttcatatatctctctctttaactccaggaacttgtcaggatggtctactttaatatgttctcgtctaagagatgaaaatctttggatggttgcacgcgacttttctctaaaggatgacgttgcccaagatcctctcttaaatgaatccatcttatccttggacaagatggacagtctattttccttagatggtttaatatttttgttacccatgatctataaaggtagacctaatcgtctcggatgaccatatatttattttcagttttattatacgcataaattgtaaaaaatatgttaggtttacgaaaatgtctcgtggggcattaatcgtttttgaaggattggacaaatctggaaaaacaacacaatgtatgaacatcatggaatcaataccttcaaacacaataaaataccttaactttcctcagagatccactgtcactggaaagatgatagatgactatctaactcgtaaaaaaacctataatgatcatatagttaatctattattttgtgcaaatagatgggagtttgcatcttttatacaagaacaactagaacagggaattactttaatagttgatagatacgcattttctggagtagcgtatgccgccgctaaaggcgcgtcaatgactctcagtaagagttatgaatctggattgcctaaacccgacttagttatattcttggaatctggtagcaaagaaattaatagaaacgtcggtgaggaaatttatgaagatgttacattccaacaaaaggtattacaagaatataaaaaaatgattgaagaaggagatattcattggcaaattatttcttctgaattcgaggaagatgtaaagaaggagttgattaagaatatagttatagaggctatacacacggttactggaccagtggggcaactgtggatgtaatagtgaaattacattttttataaatagatgttagtacagtgttataaatggatgaagcatattactctggcaacttggaatcagtactcggatacgtgtccgatatgcataccgaactcgcatcaatatctcaattagttattgccaagatagaaactatagataatgatatattaaacaaggacattgtaaattttatcatgtgtagatcaaacttggataatccatttatctctttcctagatactgtatatactattatagatcaagagaactatcagactgagttgattaattcattagacgacaatgaaattatcgattgtatagttaataagtttatgagcttttataaggataacctagaaaatatagtagatgctatcattactctaaaatatataatgaataatccagattttaaaactacgtatgccgaagtactcggttccagaatagccgatatagatattaaacaagtgatacgtaagaatatactacaattgtctaataatatccgcgaacgatatttgtgaaaatattaaaaaaaaatactttttttattaaatgacgtcttttcgtgaatttagaaaattatgctgtgctatatatcacgcatcaggatataaagaaaaatctaaattaattagagactttataacagatagggatgataaatatttgatcattaagctattgcttcccggattagacgatagaatttataacatgaacgataaacaaattataaaattatatagtataatatttaaacaatctcaggaagatatgctacaagatttaggatacggatatataggagacactattaggactttcttcaaagagaacacagaaatccgtccacgagataaaagcattttaactttagaagaagtggatagttttttaactacgttatcatccgtaactaaagaatcgcatcaaataaaattattgactgatgtagcatctgtttgtacatgtaatgatttaaaatgtgtagtcatgcttattgataaagatctaaaaattaaagcgggtcctcggtacgtacttaacgctattagtcctaatgcctatgatgtgtttagaaaatctaataacttgaaagagataatagaaaattcatctaaacaaaatctagactctatatctatttctgttatgactccaattaatcccatgttagcggaatcgtgtgattctgtcaataaggcgtttaaaaaatttccatcaggaatgtttgcggaagtcaaatacgatggtgaaagagtacaagttcataaaaataataacgagtttgccttctttagtagaaacatgaaaccagtactctctcataaagtggattatctcaaagaatacataccgaaagcatttaaaaaagctacgtctatcgtattggattctgaaattgttcttgtagacgaacataatgtaccgctcccgtttggaagtttaggtatacacaaaaagaaagaatataaaaactctaacatgtgtttgttcgtgtttgactgtttgtactttgatggattcgatatgacggacattccattgtacgaacgaagatcttttctcaaagatgttatggttgaaatacccaatagaatagtattctcagagttgacgaatattagtaacgagtctcagttaactgacgtattggatgatgcactaacgagaaaattagaaggattggtcttaaaagatattaatggagtatacgaaccgggaaagagaagatggttaaaaataaagcgagactatttgaacgagggttccatggcagattctgccgatttagtagtactaggtgcctactatggtaaaggagcaaagggtggtatcatggcagtctttctaatgggttgttacgacgatgaatccggtaaatggaagacggttaccaagtgttcaggacacgatgataatacgttaagggagttgcaagaccaattaaagatgattaaaattaacaaggatcccaaaaaaattccagagtggttagtagttaataaaatctatattcccgattttgtagtagaggatccgaaacaatctcagatatgggaaatttcaggagcagagtttacatcttccaagtcccataccgcaaatggaatatccattagatttcctagatttactaggataagagaggataaaacgtggaaagaatctactcatctaaacgatttagtaaacttgactaaatcttaatagttacatacaaactgaaaattaaaataacactatttagttggtggtcgccatggatggtgttattgtatactgtctaaacgcgctagtaaaacatggcgaggaaataaatcatataaaaaatgatttcatgattaaaccatgttgtgaaagagtttgtgaaaaagtcaagaacgttcacattggcggacaatctaaaaacaatacagtgattgcagatttgccatatatggataatgcggtatccgatgtatgcaattcactgtataaaaagaatgtatcaagaatatccagatttgctaatttgataaagatagatgacgatgacaagactcctactggtgtatataattattttaaacctaaagatgccattcctgttatcatatctataggaaaggataaagatgtctgtgaactattaatctcatcagacatatcgtgtgcatgcgtggagttaaattcatatcacgtagccattcttcccatggatgtttccttttttaccaaaggaaatgcatcattgattattctcctgtttgatttctctatcgatgcggcacctctcttaagaagtgtaaccgataataatgttattatatctagacaccagcgtctacatgacgagcttccgagttccaattggttcaagttttacataagtataaagtccgactattgttctatattatatatggttgttgatggatctgtgatgcatgcgatagctgataatagaactcacgcaattattagcaaaaatatattagacaatactacgattaacgatgagtgtagatgctgttattttgaaccacagattaggattcttgatagagatgagatgctcaatggatcatcgtgtgatatgaacagacattgtattatgatgaatttacctgatgtaggcgaatttggatctagtatgttggggaaatatgaacctgacatgattaagattgctctttcggtggctggtaatttaataagaaatcgagactacattcccgggagacgaggatatagctactacgtttacggtatagcctctagataatttttttaagcacgaaataaaaaacataattttaaaccaatctatttcatactattttgtgtgatcaccatggacataaagatagatattagtatttctggtgataaatttacggtgactactaggagggaaaatgaagaaagaaaaaaatatctacctctccaaaaagaaaaaactactgatgttatcaaacctgattatcttgagtacgatgacttgttagatagagatgagatgtttactattctagaggaatattttatgtacagaggtctattaggcctcagaataaaatatggacgactctttaacgaaattaaaaaattcgacaatgatgcggaagaacaattcggtactatagaagaactcaagcagaaacttagattaaattctgaagagggagcagataactttatagattatataaaggtacaaaaacaggatatcgtcaaacttactgtatacgattgcatatctatgataggattgtgtgcatgcgtggtagatgtttggagaaatgagaaactgttttctagatggaaatattgtttacgagcgattaaactgtttattgatgatcacatgcttgataagataaaatctatactgcagaatagactagtatatgtggaaatgtcatagaaagttaaaagttaatgagagcaaaaatatataaggttgtattccatatttgttatttttttctgtaatagttagaaaaatacattcgatggtctatctatcagattattatgtgttataaggtactttttctcataataaactagagtatgagtaagatagtgtttttcaaaacatataaatctaaaattgatggatgagatatacagctattaatttcgaaaatatattttaatctgataactttaaacatggatttttaatggtggtttaacgttttaaaaaaagattttgttattgtagtatatgataatattaaaagatggatataaagaatttgctgactgcatgtactattttttacattactacattggctacggcagatatacctacttcgtcactgccacacgctccggtaaacggggcatgtgacgagggagaatatcttgataagaggcataatcaatgttgtaatcagtgtccacctggagaatttgccaaggttagatgtaatggtaacgataacacaaaatgtgaacgctgcccacctcatacatataccgcaatccccaattactctaatggatgtcatcaatgtagaaaatgcccaacaggatcatttgataaggtaaagtgtaccggaacacagaacagtaaatgttcgtgtcttcctggttggtattgcgctactgattcttcacagactgaagattgtcgagattgtataccaaaaaggagatgtccatgcggatactttggtggaatagatgaacaaggaaatcctatttgtaaatcgtgttgtgttggtgaatattgcgactacctacgtaattatagacttgatccatttcctccatgcaaactatctaaatgtaattaattatgattttgatgataatgttaccatacattatatcgctacttggttagtgtattattcagtatgaagacctattaataattacttatcttttgacgatcttgttataattataatataaaaatacttatggcatagtaactcataattgctgacgcgataaattcgtaataatctgttttgttcaaatttttataaggaatctacaggcataaaaataaaaatataatttataatatactcttacagcgcgccatcatgaataacagcagtgaattgattgctgttattaatggatttagaaatagtggacgattttgtgatattaatatagttattaatgatgaaaggataaacgctcacagactcatcctatctggagcctccgaatatttttccattctgttttccaataattttatcgattctaatgaatacgaagttaatctaagtcatttagattatcaaagtgttaacgatttgatcgattacatttatgggatacctttgagcctaactaacgataacgtgaaatatattctttcaaccgctgattttttacaaattggatctgctattacggagtgtgaaaattacatacttaaaaatctttgttctagaaactgtatcgatttctacatatacgctgataaatataataacaagaaaatagaatcagcgtcgtttaacacaatattacaaaatattttgagactcatcaacgatgaaaactttaaatacttaacagaggaatcaatgataaaaattttaagcgatgatatgttaaatataaaaaatgaggatttcgccccactaattctcattaaatggttagagagtactcaacaaccatgcaccgtcgagttacttaaatgcctcagaatatcattgctttccccacaagttataaaatcactttatagtcatcgactggttagttcaatctacgaatgtataacattcttaaacaatatagcattcttggatgaatcatttcctagataccatagcatcgagttgatatctatcggtataagtaattcgcatgataagatttccataaactgctacaatcataaaaaaaatacatgggaaatgatatcttcacgtagatataggtgtagtttcgcagtggccgtcctggataatattatctatatgatgggtggatatgatcagtccccgtatagaagttcaaaggttatagcgtacaatacatgtacaaattcttggatatatgatataccagagctaaaatatcctcgttctaattgtgggggactggctgatgacgaatacatttattgtataggcggcatacgcgatcaggattcatcgttgacatctagtattgatagatggaagccatcaaaaccatattggcagaagtatgctaaaatgcgcgaaccaaaatgtgatatgggggttgcgatgttaaacggattaatatatgttataggtggaatcgttaaaggtgacacgtgtaccgacgcactagagagtttatcagaagatggatggatgaagcatcaacgtcttccaataaaaatgtccaatatgtcgacgattgttcatgatggcaagatttatatatctggaggttacaacaatagtagtgtagttaatgtaatatcgaatctagtccttagctataattcgatatatgatgaatggaccaaattatcatcattaaacattcctagaattaatcccgctctatggtcagcgcataataaattatatgtaggaggaggaatatctgatgatgttcgaactaatacatctgagacatacgacaaagaaaaagattgttggacattggataatggtcacgtgttaccacgcaattatataatgtataaatgcgaaccgattaaacataaatatccattggaaaaaacacagtacacgaatgattttctaaagtatttggaaagttttataggtagttgatagaacaaaatacataattttgtaaaaataaatcactttttatactaatatgacacgattaccaatacttttgttactaatatcattagtatacgctacaccttttcctcagacatctaaaaaaataggtgatgatgcaactctatcatgtaatcgaaataatacaaatgactacgttgttatgagtgcttggtataaggagcccaattccattattcttttagctgctaaaagcgacgtcttgtattttgataattataccaaggataaaatatcttacgactctccatacgatgatctagttacaactatcacaattaaatcattgactgctagagatgccggtacttatgtatgtgcattctttatgacatcgcctacaaatgacactgataaagtagattatgaagaatactccacagagttgattgtaaatacagatagtgaatcgactatagacataatactatctggatctacacattcaccggaaactagttctgagaaacctgattatatagataattctaattgctcgtcggtattcgaaatctaagcttcgcaggatcccgactccggaaccaattactgataaagaagaagatcatacagttacagacactgtctcatacactacagtaagtacatcatctggaattgtcactactaaatcaaccaccgatgatacgtacaatgataatgatacagtaccaccaactactgtaggcggtagtacaacctctattagcaattataaaaccaaggactttgtagaaatatttggtattaccgcattaattatattgtcggccgtggcaatattctgtattacgtattatatatgtaataaacgttcacgtaaatacaaaacagagaacaaagtctagatttttgacttacataaatgtctgggatagtaaaatctatcatattgagcggaccatctggtttaggaaagacagccatagccaaaagactatgggaatatatttggatttgtggtgtcccataccactagatttcctcgtcctatggaacgagaaggtgttgattaccattacgttaacagagaggccatctggaagggaatagccgccggaaactttctagaacatactgagtttttaggaaatatttacggaacttctaaaacagctgtgaatacagcggctattaataatcgtatttgtgtgatggatctaaacatcgacggtgttagaagtcttaaaaatacgtacctaatgccttactcggtgtatataagacctacctctcttaaaatggttgagaccaagcttcgtcgtagaaacactgaagctaacgatgagattcatcgtcgtgtgatgttggcaaaaactgacatggatgaggcaggtgaagccggtctattcgacactattatcattgaagatgatgtgaatttagcatatagtaagttaattcagatactacaggaccgtattagaatgtattttaacactaattagagacttaagacttaaaacttgataattaataatataactcgtttttatatgtgtctatttcaacgtctaatgtattagttaaatattaaaacttaccacgtaaaacttaaaatttaaaatgatatttcattgacagatagatcacacattatgaactttcaaggacttgtgttaactgacaattgcaaaaatcaatgggtcgttggaccattaataggaaaaggtggattcggtagtatttatactactaatgacaataattatgtagtaaaaatagagcccaaagctaacggatcattatttaccgaacaggcattttatactagagtacttaaaccatccgttatcgaagaatggaaaaaatctcacaatataaagcacgtaggtcttatcacgtgcaaggcatttggtctatacaaatccattaatgtggaatatcgattcttggtaattaatagattaggtgcagatctagatgcggtgatcagagccaataataatagactaccaaaaaggtcggtgatgttgatcggaatcgaaatcttaaataccatacaatttatgcacgagcaaggatattctcacggagatattaaagcgagtaatatagtcttagatcaaatagataagaataaattatatctagtggattacggattggtttctaaattcatgtctaatggcgaacatgttccatttataagaaatccaaataaaatggataacggtactctagaatttacacctatagattcgcataaaggatacgttgtatctagacgtggagatctagaaacacttggatattgtatgattagatggttgggaggtatcttaccatggactaagatatctgaaacaaagaattgtgcattagtaagtgccacaaaacagaaatatgttaacaatactgcgactttgttaatgaccagtttgcaatatgcacctagagaattgctgcaatatattaccatggtaaactctttgacatattttgaggaacccaattacgacaagtttcggcacatattaatgcagggtgtatattattaagtgtggtgtttggtcgataaaaattaaaaaataacttaatttattattgatctcgtgtgtacaaccgaaatcatggcgatgttttacgcacacgctctcggtgggtacgacgagaatcttcatgcctttcctggaatatcatcgactgttgccaatgatgtcaggaaatattctgttgtgtcagtttataataacaagtatgacattgtaaaagacaaatatatgtggtgttacagtcaggtgaacaagagatatattggagcactgctgcctatgtttgagtgcaatgaatatctacaaattggaaatccgatccatgatcaagaaggaaatcaaatctctatcatcacatatcgccacaaaaactactatgctctaagcggaatcgggtacgagagtctagacttgtgtttggaaggagtagggattcatcatcacgtacttgaaacaggaaacgctgtatatggaaaagttcaacatgattattctactatcaaagagaaggccaaagaaatgagtgcacttagtccaggacctatcatcgattaccacgtctggataggagattgtatctgtcaagttactgctgtggacgtacatggaaaggaaattatgaaaatgagattcaaaaagggtgcggtgcttccgatcccaaatctggtaaaagttaaacttggggagaatgatacagaaaatctttcttctactatatcggcggcaccatcgaggtaaccacctctctggaagacagcgtgaatcatgtactcatgaaacgtttggaaactatacgccatatgtggtctgttgtatatgatcattttgatattgtgaatggtaaagaatgctgttatgtgcatacgcattcatctaatcaaaatcctataccgagtactgtaaaaacaaatttgtacatgaagactatgggatcatgcattcaaatggattccatggaagctctagagtatcttagcgaactgaaggaatcaggtggatggagtcccagaccagaaatgcaggaatttgaatatccagatggagtggaagacactgaatcaattgagagattggcagaggagttcttcaatagatcagaacttcaggctggtgaatcagtcaaatttggtaattctattaattgttaaacatacatctgtttcagctaagcaactaagaacacgtatacggcagcagcttccttctatactctcatcttttaccaacacaaagggtggatatttgttcattggagttgataataatacacacaaagtatttggattcacggtgggttacgactacctcagactgatagagaatgatatagaaaagcatatcaaaagacttcgtgttgtgcatttctgtgagaagaaagaggacatcaagtacgcgtgtcgattcatcaaggtatataaacctggggatgagactacctcgacatacgtgtgcgctatcaaagtggaaagatgctgttgtgctgtgtttgcagattggccagaatcatggtatatggatactaatggtatcaagaagtattctccagatgaatgggtgtcacatataaaattttaattaatgtaactatagagaacaaataataaggttgtaatatcatatagacaataactaacaattaattagtaactgttatctcttttttaactaaccaactaactatatacctattaatacatcgtaattatagttcttaacatctattaatcattaattcgcttctttaattttttataaactaacattgttaattgaaaagggataacatgttacagaatataaattatatatggatttttttaaaaaggaaatacttgactggagtatatatttatctcttcattatatagcacgcgtgttttccaatttttccacatcccatataatacaggattataatctcgttcgaacatacgagaaagtggataaaacaatagttgattttttatctaggttgccaaatttattccatattttagaatatggggaaaatattctacatatttattctatggatgatgctaatacgaatattataattttttttctagatagagtattaaatattaataagaacgggtcatttatacacaatctcgggttatcatcatccattaatataaaagaatatgtatatcaattagttaataatgatcatccagataataggataagactaatgcttgaaaatggacgtagaacaagacattttttgtcctatatatcagatacagttaatatctatatatgtattttaataaatcatggattttatatagatgccgaagacagttacggttgtacattattacatagatgtatatatcactataagaaatcagaatcagaatcatacaatgaattaattaagatattgttaaataatggatcagatgtagataaaaaagatacgtacggaaacacaccttttatcctattatgtaaacacgatatcaacaacgtggaattgtttgagatatgtttagagaatgctaatatagactctgtagactttaatagatatacacctcttcattatgtctcatgtcgtaataaatatgattttgtaaagttattaatttctaaaggagcaaatgttaatgcgcgtaataaattcggaactactccattttattgtggaattatacacggtatctcgcttataaaactatatttggaatcagacacagagttagaaatagataatgaacatatagttcgtcatttaataatttttgatgctgttgaatctttagattatctattatccagaggagttattgatattaactatcgtactatatacaacgaaacatctatttacgacgctgtcagttataatgcgtataatacgttggtctatctattaaacaaaaatggtgattttgagacgattactactagtggatgtacatgtatttcggaagcagtcgcaaacaacaacaaaataataatggaagtactattgtctaaacgaccatctttgaaaattatgatacagtctatgatagcaattactaaacataaacagcataatgcagatttattgaaaatgtgtataaaatatactgcgtgtatgaccgattatgatactcttatagatgtacagtcgctacagcaatataaatggtatattttaagatgtttcgatgaaatagatatcatgaagagatgttatataaaaaataaaactgtattccaattagttttttgtatcaaagacattaatactttaatgagatacggtaaacatccttctttcgtgaaatgcactagtctcgacgtatacggaagtcgtgtacgtaatatcatagcatctattagatatcgtcagagattaattagtctattatccaagaagctggatcctggagataaatggtcgtgttttcctaacgaaataaaatataaaatattggaaaactttaacgataacgaactatccacatatctaaaaatcttataaacattattaaaatataaaatctaagtaggataaaatcacactacatcattgtttccttttagtgctcgacagtgtatactatttttaacgctcataaataaaaatgaaaacgatttccgttgttacgttgttatgcgtactacctgctgttgtttattcaacatgtactgtacccactatgaataacgctaaattaacgtctaccgaaacatcgtttaatgataaccagaaagttacgtttacatgtgatcagggatatcattctttggatccaaatgctgtctgtgaaacagataaatggaaatacgaaaatccatgcaaaaaaatgtgcacagtttctgattatgtctctgaactatataataaaccgctatacgaagtgaattccaccatgacactaagttgcaacggcgaaacaaaatattttcgttgcgaagaaaaaaatggaaatacttcttggaatgatactgttacgtgtcctaatgcggaatgtcaacctcttcaattagaacacggatcgtgtcaaccagttaaagaaaaatactcatttggggaatatatgactatcaactgtgatgttggatatgaggttattggtgcttcgtacataagttgtacagctaattcttggaatgttattccatcatgtcaacaaaaatgtgatatgccgtctctatctaacggattaatttccggatctacattttctatcggtggcgttatacatcttagttgtaaaagtggttttacactaacggggtctccatcatccacatgtatcgacggtaaatggaatcccatactcccaatatgtgtacgaactaacgaaaaatttgatccagtggatgatggtcccgacgatgagacagatttgagcaaactctcgaaagacgttgtacaatatgaacaagaaatagaatcgttagaagcaacttatcatataatcatagtggcgttgacaattatgggcgtcatatttttaatctccgttatagtattagtttgttcctgtgacaaaaataatgaccaatataagttccataaattgctaccgtaaatataaatccgttaaaataattaataatttaataacaaacaagtatcaaaagattaaagacttatagctagaatcaattgagatgtcttcttcagtggatgttgatatctacgatgccgttagagcatttttactcaggcactattataacaagagatttattgtgtatggaagaagtaacgccatattacataatatatacaggctatttacaagatgcgccgttataccgttcgatgatatagtacgtactatgccaaatgaatcacgtgttaaacaatgggtgatggatacacttaatggtataatgatgaatgaacgcgatgtttctgtaagcgttggcaccggaatactattcatggaaatgtttttcgattacaataaaaatagtatcaacaatcaactaatgtatgatataattaatagcgtatctataattctagctaatgagagatatagaagcgcttttaacgacgatggtatatacatccgtagaaatatgattaacaagttgtacggatacgcatctctaactactattggcacgatcgctggaggtgtttgttattatctgttgatgcatctagttagtttgtataaataattatttcaatatactagttaaaattttaagattttaaatgtataaaaaactaataacgtttttatttgtaataggtgcattagcatcctattcgaataatgagtacactccgtttaataaactgagtgtaaaactctatatagatggagtagataatatagaaaattcatatactgatgataataatgaattggtgttaaattttaaagagtacacaatttctattattacagagtcatgcgacgtcggatttgattccatagatatagatgttataaacgactataaaattattgatatgtataccattgactcgtctactattcaacgcagaggtcacacgtgtagaatatctaccaaattatcatgccattatgataagtacccttatattcacaaatatgatggtgatgagcgacaatattctattactgcagagggaaaatgctataaaggaataaaatatgaaataagtatgatcaacgatgatactctattgagaaaacatactcttaaaattggatctacttatatatttgatcgtcatggacatagtaatacatattattcaaaatatgatttttaaaaatttaaaatatattatcacttcagtgacagtagtcaaataacaaacaacaccatgagatatattataattctcgcagttttgttcattaatagtatacatgctaaaataactagttataagtttgaatccgtcaattttgattccaaaattgaatggactggggatggtctatacaatatatcccttaaaaattatggcatcaagacgtggcaaacaatgtatacaaatgtaccagaaggaacatacgacatatccgcatttccaaagaatgatttcgtatctttctgggttaaatttgaacaaggcgattataaagtggaagagtattgtacgggactatgcgtcgaagtaaaaattggaccaccgactgtaacattgactgaatacgacgaccatatcaatttgtacatcgagcatccgtatgctactagaggtagcaaaaagattcctatttacaaacgcggtgacatgtgtgatatctacttgttgtatacggctaacttcacattcggagattctaaagaaccagtaccatatgatatcgatgactacgattgcacgtctacaggttgcagcatagactttgtcacaacagaaaaagtgtgcgtgacagcacagggagccacagaagggtttctcgaaaaaattactccatggagttcgaaagtatgtctgacacctaaaaagagtgtatatacatgcgcaattagatccaaagaagatgttcccaatttcaaggacaaaatggccagagttatcaagagaaaatttaatacacagtctcaatcttatttaactaaatttctcggtagcacatcaaatgatgttaccacttttcttagcatgcttaacttgactaaatattcataactaatttttattaatgatacaaaaacgaaataaaactgcatattatacactggttaacgcccttataggctctaaccattttcaagatgaggtccctgattatagtccttctgttcccctctatcatctactccatgtctattagacgatgtgagaagactgaagaggaaacatggggattgaaaatagggttgtgtataattgccaaagatttctatcccgaaagaactgattgcagtgttcatctcccaactgcaagtgaaggattgataactgaaggcaatggattcagggatatacgaaacaccgataaattataaaaaaagcaatgtgtccgctgtttccgttaataatactattttcgtaactggcggattattcataaataactctaatagcacgatcgtggttaacaatatggaaaaacttgacatttataaagacaaacaatggtcgattatagaaatgcctatggctagggtatatcacggcattgactcgacatttggaatgttatattttgccggaggtctatccgttaccgaacaatatggtaatttagagaaaaacaacgagatatcttgttacaatcctagaacgaataagtggtttgatatttcatatactatttataagatatccatatcatcattgtgtaaactaaataacgtcttctatgtatttagtaaggacattggatatgtggaaaagtatgatggtgcatggaagttagtacatgatcgtctccccgctataaaggcattatcaacttctccttattgattgaaaatgaaaatataaatagtttttatgtatagcagtattaccctatagttttattgcttactactaacatggatacagatgttacaaatgtagaagatatcataaatgaaatagatagagagaaagaagaaatactaaaaaatgtagaaattgaaaataataaaaacattaacaagaatcatcccaatgaatatattagagaagcactcgttattaataccagtagtaatagtgattccattgataaagaagttatagaatgtatcagtcacgatgtaggaatatagatcatatctactaatttttataatcgatacaaaacataaaaaacaactcgttattacatagcaggcatggaatccttcaagtattgttttgataacgatggcaagaaatggattatcggaaatactttatattctggtaattcaatactctataaggtcagaaaaaatttcactagttcgttctacaattacgtaatgaagatagatcacaaatcacacaagccattgttgtctgaaatacgattctatatatctgtattggatcctttgactatcgacaactggacacgggaacgtggtataaagtatttggctattccagatctgtatggaattggagaaaccgatgattatatgttcttcgttataaagaattcgggaagagtattcgccccaaaggatactgaatcagtcttcgaagcatgcgtcactatgataaacacgttagagtttatacactctcgaggatttacccatggaaaaatagaaccgaggaatatactgattagaaataaacgtctttcactaattgactattctagaactaacaaactatacaagagtggaaactcacatatagattacaacgaggacatgataacttcaggaaatatcaattatatgtgtgtagacaatcatcttggagcaacagtttcaagacgaggagatttagaaatgttgggatattgcatgatagaatggttcggtggcaaacttccatggaaaaacgaaagtagtataaaagtaataaaacaaaaaaaagaatataaaaaatttatagctactttctttgaggactgttttcctgaaggaaatgaacctctggaattagttagatatatagaattagtatacacgttagattattctcaaactcctaattatgacagactacgtaaactgtttatacaagattgaaattatattcttttttttatagagtgtggtagtgttacggatatctaatattaatattagactatctctatcgcgctacacgaccaatatcgattactatggatatcttctatgaaaggagagaatgtatttatttctccagcgtcaatctcgtcagtattgacaatactgtattatggagctaatggatccactgctgaacagctatcaaaatatgtagaaacggaggagaacacggataaggttagcgctcagaatatctcattcaaatccatgaataaagtatatgggcgatattctgccgtgtttaaagattcctttttgagaaaaattggcgataagtttcaaactgttgacttcactgattgtcgcactatagatgcaatcaacaagtgtgtagatatctttactgaggggaaaatcaatccactattggatgaaccattgtctcctagcaattagtgccgtatactttaaagcaaaatggttgacgccattcgaaaaggaatttaccagtgattatcccttttacgtatctccgacggaaatggtagacgtaagtatgatgtctatgtacggcaaggcatttaatcacgcatctgtaaaagaatcattcggcaacttttcaatcatagaactgccatatgttggagatactagtatgatggtcattcttccagacaagattgatggattagaatccatagaacaaaatctaacagatacaaattttaagaaatggtgtgactttatggatgctatgtttatagatgttcacattcccaagtttaaggtaacaggctcgtataatctggtggatactctagtaaagtcaggactgacagaggtgttcggttcaactggagattatagcaatatgtgtaatttagatgtgagtgtcgacgctatgatccacaaaacgtatatagatgtcaatgaagagtatacagaagcagctgcagcaacttctgtactagtggcagactgtgcatcaacaattacaaatgagttctgtgcagatcatccgttcatctatgtgattaggcatgttgatggaaaaattcttttcgttggtagatattgctctccgacaactaattgttaaccattttttttaaaaaaaatagaaaaaacatgtggtattagtgcaggtcgttgttcttccaattgcaattggtaagatgacggccaactttagtacccacgtcttttcaccacagcactgtggatgtgacagactgaccagtattgatgacgtcaaacaatgtttgactgaatatatttattggtcgtcctatgcataccgcaacaggcaatgcgctggacaattgtattccacactcctctcttttagagatgatgcggaattagtgttcatcgacattcgcgagctggtaaaaaatatgccgtgggatgatgtcaaagattgtacagaaatcatccgttgttatataccggatgagcaaaaaaccatcagagagatttcggccatcatcggactttgtgcatatgctgctacttactggggaggtgaagaccatcccactagtaacagtctgaacgcattgtttgtgatgcttgagatgctaaattacgtggattataacatcatattccggcgtatgaattgatgagttgtacatcttgacattttctttcttctcttctccctttcttctcttctcccttcctccctcttctccctttcccagaaacaaacttttttacccactataaaataaaatgagtatactacctattatatttcttcctatatttttttattcttcattcgttcagacttttaacgcgtctgaatgtatcgacaaagggcaatattttgcatcattcatggagttagaaaacgagccagtaatcttaccatgtcctcaaataaatacgctatcatccggatataatatattagatattttatgggaaaaacgaggagcggataatgatagaattataccgatagataatggtagcaatatgctaattctgaacccgacacaatcagactctggtatttatatatgcattaccacgaacgaaacctactgtgacatgatgtcgttaaatttgacaatcgtgtctgtctcagaatcaaatatagatcttatctcgtatccacaaatagtaaatgagagatctactggcgaaatggtatgtcccaatattaatgcatttattgctagtaacgtaaacgcagatattatatggagcggacatcgacgccttagaaataagagacttaaacaacggacacctggaattattaccatagaagatgttagaaaaaatgatgctggttattatacatgtgttttagaatatatatacggtggcaaaacatataacgtaaccagaattgtaaaattagaggtacgggatagaataataccttctactatgcaattaccagatggcattgtaacttcaataggtagtaatttgactattgcatgcagagtatcgttgagacctcccacaacggacaccgacgtcttttggataagtaatggtatgtattacgaagaagatgatggggacggaaacggtagaataagtgtagcaaataaaatctatatgaccgataagagacgtgttattacatcccggttaaacattaatcctgtcaaggaagaagatgctacaacgtttacgtgtatggcgtttactattcctagcatcagcaaaacagttactgttagtataacgtgaatgtatgttgttacatttccatgtcaattgagtttataagaatttttatacattatcttccaacaaacaattgacgaacgtattgctatgattaactcccacgatactatgcatattattaatcattaacttgcagactatacctagtgctattttgacatactcgtgttcttgtgtaattgcggtatctatattattaaagtacgtaaatctagctatagttttattatttaattttagataatataccgtctccttatttttaaaaattgccacatcctttattaaatcatgaatgggaatttctatgtcatcgttagtatattgtgaacaacaagagcagatatctataggaaagggtggaatgcgatacattgatctatgtagttttaaaacacacgcgaactttgaagaatttatataaatcattccatcgatacatccttctatgttgacatgtatatatccaggaattcttttattaatgtcaggaaatgtataaactaaaacattgcccgaaagcggtgcctctatctgcgttatatccgttcttaacttacaaaatgtaaccaatacctttgcatgacttgttttgttcggcaacgttagtttaaacttgacgaatggattaattacaatagcatgatccgcgcatctattaagtttttttactttaacgcccttgtatgtttttacagagactttatctaaatttctagtgcttgtatgtgttataaatataacgggatatagaaccgaatcacctaccttagatacccaattacattttatcagatccagataataaacaaattttgtcgccctaactaattctatattgttatatattttacaattggttatgatatcatgtaataacttggagtctaacgcgcatcgtcgtacgtttatacaattgtgatttagtgtagtatatctacacatgtatttttccgcactatagtattctggactagtgataaaactatcgttatatctgtcttcaatgaactcatcgagatattgctctctgtcatattcatacacctgcataaactttctagacatcttacaatccgtgttattttaggatcatatttacatatttacgggtatatcaaagatgttagattagttaatgggaatcgtctataataatgaatattaaacaattatatgaggacttttaccacaaagcatcataaaaatgagtcgtcgtctgatttatgttttaaatatcaaccgcaaatcaactcataaaatacaagagaatgaaatatatacatattttagtcattgcaatatagaccatacttctacagaacttgattttgtagttaaaaactatgatctaaacagacgacaacctgtaactgggtatactgcactacactgctatttgtataataattactttacaaacgatgtactgaagatattattaaatcatgacgtaaatgtaacgatgaaaaccagtagcggacgtatgcctgtttatatattgcttactagatgttgtaatatttcacatgatgtagtgatagatatgatagacaaagataaaaaccacttattacatagagactattccaacctattactagagtatataaaatctcgttacatgttattgaaggaagaggatatcgatgagaacatagtatccactttattagataagggaatcgatcctaactttaaacaagacggatatacagcgttacattattattatttgtgtctcgcacacgtttataaactaggtgagtgtagaaaaccgataacgataaaaaaggccaagcgaattatttctttgtttatacaacatggagctaatctaaacgcgttagataattgtggtaatacaccattccatttgtatcttagtattgaaatgtgtaataatattcatatgactaaaatgctgttgacttttaatccgaatttcaaaatatgtaataatcatggattaacgcctatactatgttatataacttccgactacatacaacacgatattcttgttatgttaatacatcactatgaaacaaatgttggagaaatgccgatagatgagcgtcgtatgatcgtattcgagtttatcaaaacatattctacacgtccggcagattcgataacttatttgatgaataggtttaaaaatataaatatttatacccgctatgaaggaaagacattattacacgtagcatgtgaatataataatacacaagtaatagattatcttatacgtatcaacggagatataaatgcgttaaccgacaataacaaacacgctacacaactcattatagataacaaagaaaattccccatataccattaattgtttactgtatatacttagatatattgtagataagaatgtgataagatcgttggtggatcaacttccatctctacctatcttcgatataaaatcatttgagaaattcatatcctactgtatacttttagatgacacattttacgataggcacgttaagaatcgcgattctaaaacgtatcgatacgcattttcaaaatacatgtcgtttgataaatacgatggtataataactaaatgtcacgacgaaacaatgttactcaaactgtccactgttctagacactacactatatgcagttttaagatgtcataattcgagaaagttaagaagatacctcaacgagttaaaaaaatataataacgataagtcctttaaaatatattctaatattatgaatgagagataccttaatgtatattataaagatatgtacgtgtcaaaggtatatgataaactatttcctgttttcacagataaaaattgtctactaacattactaccttcagaaattatatacgaaatattatacatgctgacaattaacgatctttataatatatcgtatccacctaccaaagtatagttgtatttttctcatgcgatgtgtgtaaaaaaactgatattatataaatattttagtgccgtataataaagatgacgatgaaaatgatggtacatatatatttcgtatcattattgttattgctattccacagttacgccatagacatcgaaaatgaaatcacagaattcttcaataaaatgagagatactctaccagctaaagactctaaatggttgaatccagcatgtatgttcggaggcacaatgaatgatatagccgctctaggagagccattcagcgcaaagtgtcctcctattgaagacagtcttttatcgcacagatataaagactatgtggttaaatgggagaggctagaaaagaatagacggcgacaggtttctaataaacgtgttaaacatggtgatttatggatagccaactatacatctaaattcagtaaccgtaggtatttgtgcaccgtaactacaaagaatggtgactgtgttcagggtatagttagatctcatattaaaaaacctccttcatgcattccaaaaacatatgaactaggtactcatgataagtatggcatagacttatactgtggaattctttacgcaaaacattataataatataacttggtataaagataataaggaaattaatatcgacgacattaagtattcacaaacgggaaaggaattaattattcataatccagagttagaagatagcggaagatacgactgttacgttcattacgacgacgttagaatcaagaatgatatcgtagtatcaagatgtaaaatacttacggttataccgtcacaagaccacaggtttaaactaatactagatccgaaaatcaacgtaacgataggagaacctgccaatataacatgcactgctgtgtcaacgtcattattgatcgacgatgtactgattgaatgggaaaatccatccggatggcttataggattcgattttgatgtatactctgttttaactagtagaggcggtatcaccgaggcgaccttgtactttgaaaatgttactgaagaatatataggtaatacatataaatgtcgtggacacaactattattttgaaaaaacccttacaactacagtagtattggagtaaatatacaatgcatttttatatacattactgaattattattactgaattattattactgaattattattaattatatcgtatttgtgctatagaatggatgaagatacgcgactatctaggtatttgtatctcaccgatagagaacatataaatgtagactctattaaacagttgtgtaaaatatcagatcctaatgcatgttatagatgtggatgtacggctttacatgagtacttttataattatagatcagtcaacggaaaatacaagtatagatacaacggttactatcaatattattcatctagcgattatgaaaattataatgaatattattatgatagaactggtatgaacagtgagagtgataatatatcaatcaaaacagaatatgaattctatgatgaaacacaagatcaaagtacacaactagtaggttacgacattaaactcaaaaccaatgaggatgattttatggctatgatagatcagtgggtgtccatgattatatagatgaatcaattaataaagtagtatatggaagagagtctcacgtaagatggcgggatatatggcaagaacataatgatggcgtatacagtataggaaaggagtgcatagataatatatacgaagacaaccataccgtagacgaattctacaagatagacagcgtatcagatgtagatgacgcggaacacatatctccgataactaaaaaaccatagaatcagttgatgataatacctacatttctaatcttccgtataccatcaaatacaaaatattcgagcaacaataagtattttttatacctttaaaactgataaataaattttttctagtgatattttggcaagatgagaatcctatttctcatcgctttcatgtatgggtgtgttcactcatatgttaacgcggttgaaaccaaatgtccaaatctagacattgtaacatcttctggagaatttcattgttcaggatgtgtggaacatatgcctgagtttagctatatgtattggttggcaaaggatatgaaatcggacgaggataccaagtttatagaacatctgggtgatggcatcaaagaagatgaaaccgttcgtaccacagatagtggaatcgtcactctacgtaaagtccttcatgtgactgatactaataaatttgataattataggttcacttgtgtcctcgctacgctagatggcatttataaaaagaatgtttgctgaagtagttgtgtgctactatttttatttatgatataatctaatggaattaatttgaattgatatttatccaatactaaagattatattagaatcaaattaatcttttatacgagaaaaaataacgacatacgtcgtcaacaaattaaactttttatttattagttaactagcttatagaacttgctcattgttatgtttctaaaacgggtacggcatataggacaattatccgacgcaccggtttctcttcgtgttctatgccatatattgatgcatgttatgcaaaatatatgagtacacgaatccaataaaccaaagtatctatcgttttgagtaaacaacttcatagcaaattccacattctttttctttacttactctatacacgtcctcgtatttatttagtattttgatgatatccaactcagaaatggttgttgtattattgggtgtatttggagtataggtattattagctatgtaccaatttaccaaccctcttaatattgattgataatcacatcggttatccaattaataactaaattgtagtgtatatatagaccatatatgtttctatttttttgacagttacgtatagtttcagtaagttttgattgttgtattcctgtatctctagataagttagtcatatagtcccttccggcgatacgttttttccaagcccgaaattgattagccaaatgtgtatttatttttgtgatattgatataatatttcggataatgcatactgttagtcttatatcatttggttcatctatgtattgtaatattgttacatgatctatagatgatgtattgattttggcaggatcgaattccatatccgcgactaaacagtgaaaaaaatgtaaatactttttaaattttaaattagtaaaacttttttttattttttatgattccaaaaatactgaatacaaagtcctaaattataaatatggagatcatactaccacaacttattattatgtatacaaggccggtgtaatagatagatatatataattctattacaccggcagacaattaccgaccggtatttgtcgttaccaacataccgtataatatgtaatatacaattccataacccattgacagttgttatacatcaaaattgcaattcttttgattacgatgttataagaatgtagttaattgatgtatgatgttaatgtgtcctctttcctcttataacatcgtaatcaaaaacttttttataatatatacctaataatgtgtcttaatagttctcgtgattcgtcaaacaatcattcttataaaatataataaagcaacgtaaaaacacataaaaataagcgtaactaataagacaatggatatttacgacgataaaggtctacagactattaaactgtttaataatgaatttgattgtataaggaatgacatcagagaattatttaaacatgtaactgattccgatagtatacaacttccgatggaagacaattctgatattatagaaaatatcagaaaaatactatatagacgattaaaaaatgtagaatgtgttgacatcgataacacaataacttttatgaaatacgatccaaatgatgataataagcgtacgtgttctaattgggtacccttaactaataactatatggaatattgtctagtaatatatttggaaacaccgatatgtggaggcaaaataaaattataccaccctacaggaaatataaagtcggataaggatattatgtttgcaaagactctagactttaaatcaacgaaagtgttaactggacgtaaaacaattgccgttctagacatatccgtttcatataatagatcaatgactactattcactacaacgacgacgttgatatagatatacatactgataaaaatggaaaagagttatgttattgttatataacaatagatgatcattacttggttgatgtggaaactataggagttatagtcaatagatctggaaaatgtctgttagtaaataaccatctaggtataggtatcgttaaagataaacgtataagcgatagttttggagatgtatgtatggatacaatatttgacttttctgaagcacgagagttattttcattaactaatgatgataacaggaatatagcatgggacactgataaactagacgatgatacagatatatggactcccgtcacagaagatgattacaaatttctttctagactagtattgtatgcaaaatctcaatcggatactgtatttgactattatgttcttactggtgatacggaaccacccactgtattcattttcaaggtaactagattttactttaatatgccgaaataaaaaatttttgtataatatctagaggtagaggtattgtttagataaatacaaataacatagatacatcgcatacttagcatttttataaatatacataagacatacactttatacatttttgtaaaaatactcataaaaaaatttataaaaattatggcacaaccatatcttgtataggtagtttagttcgtcgagtgaacctataaacagataatagacaacacataataatgcctactaatacaagcataataccgggagatgggatatatgacgttgtagtgtttgggttttctgaacgttgatagtctactaatactacatgctgacatctaatgcctgtataaccatgagagcatctacaatacataccgtcaatatctctagcgtggatacagtcaccgtgtaaacaatatccatctccctctggaccgcataatctgatagctggaatatctgttgtagcgtttgtaatttctggcaatgtcgtttcgatagcgttaccactatcggcgaatgatctgattatcatagcagcgaacaacaacatcagataatttatcaacatttttgatggattctgtgtttatgctgtttctcagtgtgtgtttatgacaagattgggaattttatattattaattcagtaatataaactaataatatattgttaattgtgtaaataatataaaaataacaatacaatattgaatgtgttgctgttaaaaatgtatgtgttaatataatagaataaaataaatgagtatgatcattttagataacgattgattttatcattaccgcttcattcttatattctttgcttacggaacctatatttagaaacatctactaacaattttttatgcttgcattattaatggtatgtaatatgattgattgtgtacgcaataccaatttgttaagtatgaatacggggtacaaacataaattgaaatttaacattatttatttatgatatatatcgttatcgttaggtctataccatggatatctttaaagaactaatcttaaaacaccctgatgaaaatgttttgatttctccagtttccattttatctactttatctattctaaatcatggagcagctggttctacagctgaacaactatcaaaatatatagagaatatgaatgagaatacacccgatgacaataatgatgacatggaggtagatattccgtattgtgcgacactagctaccgcaaataaaatatacggtagcgatagtatcgagttccacgcctccttcctacaaaaaataaaagacgattttcaaactgtaaactttaataatgctaaccaaacaaaggaactaatcaacgaatgggttaagacaatgacaaatggtaaaattaattccttattgactagtccgctatccattaatactcgtatgacagttgttagcgccgtccattttaaagcaatgtggaaatatccattttctaaacatcttacatatacagacaagttttatatttctaagaatatagttaccagcgttgatatgatggtgggtaccgagaataacttgcaatatgtacatattaatgaattattcggaggattctctattatcgatattccatacgagggaaactctagtatggtaattatactaccggacgacatagaaggtatatataacatagaaaaaaatataacagatgaaaaatttaaaaaatggtgtggtatgttatctactaaaagtatagacttgtatatgccaaagtttaaagtggaaatgacagaaccgtataatctggtaccgattttagaaaatttaggacttactaatatattcggatattatgcagattttagcaagatgtgtaatgaaactatcactgtagaaaaatttctacatacgacgtttatagatgttaatgaggagtatacagaagcatcggccgttacaggagtatttacgattaacttttcgatggtatatcgtacgaaggtctacataaaccatccattcatgtacatgattaaagacaccacaggacgtatactttttatagggaaatactgctatccgcaataaatataaacaaatagacttttataaagagtcttcaacgataagtatatcgacatactacttatgctgcgaaagattctgaacgagaacgactatctcaccctcttggatcatatccgcactgctaaatactaaatctccactacactttttatcatcttatgaggaatgattgccttcgtgaaataggaataattagcaccagaatagctatggattattgtggtagagagtgcactattctatgtcgtctactggatgaagatgtgacgtacaaaaaaataaaactagaaattgaaacgtgtcacaacttatcaaaacatatagatagacgaggaaacaatgcgctacattgttacgtctccaataaatgcgatacagacattaagattgttctctcgcggagtcgagagactttgtagaaacaacgaaggattaactccgctaggagtatacagtaagcatagatacgtaaaatctcagattgtgcatctactgatatccagctattcaaattcctctaacgaactcaagtcgaatataaatgatttcgatctgtattcggataatatcgacttacgtctgctaaaatacctaattgtggataaacggatacgtccgtccaagaatacgaattatgcaatcaatggtctcggattggtggatatatacgtaacgacgcctaatccgagaccagaagtattgctatggcttcttaaatcagaatgttacagcaccggttacgtatttcgtacctgtatgtacgacagtgatatgtgtaagaactctcttcattactatatatcgtctcatagagaatctcaatctctatccaaggatgtaattaaatgtttgatcgataacaatgtttccatccatggcagagacgaaggaggatctttacccatccaatactactggtctttctcaaccatagatatagagattgttaaattattattaataaaggatgtggacacgtgtagagtatacgacgtcagccctatattagaggcgtattatctaaacaagcgatttagagtaaccccatataatgtagacatggaaatcgttaatcttcttattgagagacgtcatactcttgtcgacgtaatgcgtagtattacttcgtacgattccagagaatataaccactacatcatcgataacattctaaagagatttagacaacaggatgaatccatcgtacaagccatactgataaactacttacattacggcgatatggtcgttcgatgcatgttagataacggacaacaactatcctctacacgactactttgttaataataatctcgtcgatgtaaacgtcgtaaggtttatcgtggaaaatatggacacgcggctgtaaatcacgtatcgaacaatggccgtctatgtatgtacggtctgatattatcgagatttaataattgcgggtatcactgttatgaaaccatactgatagatgtatttgatatactaagcaagtacatggatgatatagatatgatcgataactctactatattacgcggtcgatgtcaataatatacaatttgcaaagcggttattggaatatggagcgagtatcacgctcgataatcaatacggccatccagaaaagcagttacagaagagaaaacaaaacgaaatcgttgttctacaagatgtctctccctacgacgattactacgtaaaaaagatactagcctactgcctattaagggacgagtcattcgcggaactacatagtaaattctgtttaaacgaggactataaaagtgtatttatgaaaaatatatcattcgataagatagattccatcatcgtgacataagtcgcctcaaagagattcgaatctccgacaccgacctgtatacggtatcacagctatcttaaagccatacattcagacagtcacatttcatttcccatgtacgacgatctcatagaacagtgccatctatcgatggagcgtaaaagtaaactcgtcgacaaagcactcaataaattagagtctaccatcggtcaatctagactatcgtatttgcctccggaaattatgcgcaatatcatctaaacagtatgttgtacggaaagaaccattacaaatattatccatgatagaaagaaaatatctatatgattggagaagtaggaaacaggaacaagacaacgattactacattattaaatcatgaagtccgtattatactcgtatatattgtttctctcatgtataataataaacggaagagatatagcaccgcatgcaccatccgatggaaagtgtaaagacaacgaatacaaacgccataatttgtgtccgggaacatacgcttccagattatgcgatagcaagactaacacacgatgtacgccgtgtggttcgggtaccttcacatctcgcaataatcatttacccgcttgtctaagttgtaacggaagacgcgatcgtgtaacacgactcacaatagaatctgtgaatgctctcccggatattattgtcttctcaaaggatcatccggatgcaaggcatgtgtttcccaaacaaaatgtggaataggatacggagtatccggagacgtcatctgttctccgtgtggtctcggaacatattctcacaccgtctcttccgcagataaatgcgaacccgtacccagaaatacgtttaactatatcgatgtggaaattaacctgtatccagttaacgacacgtcgtgtactcggacgaccactaccggtctcagcgaatccatctcaacgtcggaactaactattactatgaatcataaagactgtaatcccgtatttcgtgatggatacttctccgttcttaataaggtagcgacttcaggtttctttacaggagaaaggtgtgcactctgaatttcgagattaaatgcaataacaaagattcttcctccaaacagttaacgaaagcaaagaatgatactatcatgccgcattcggagacagtaactctagtgggcgacatctatatactatatagtaataccaatactcaagactacgaaactgatacaatctcttatcatgtgggtaatgttctcgatgtcgatagccatatgcccggtagttgcgatatacataaactgatcactaattccaaacccacccactttttatagtaagtttttcacccataaataataaatacaataattaatttctcgtaaaagtagaaaatatattctaatttattgcacggtaaggaagtagaatcataaagaacagtactcaatcaatagcaattatgaaacaatatatcgtcctggcatgcatgtgcctggcggcagctgctatgcctgccagtcttcagcaatcatcctcatcctcctcctcgtgtacggaagaagaaaacaaacatcatatgggaatcgatgttattatcaaagtcacaaagcaagaccaaacaccgaccaatgataagatttgccaatccgtaacggaaattacagagtccgagtcagatccagatcccgaggtggaatcagaagatgattccacatcagtcgaggatgtagatcctcctaccacttattactccatcatcggtggaggtctgagaatgaactttggattcaccaaatgtcctcagattaaatccatctcagaatccgctgatggaaacacagtgaatgctagattgtccagcgtgtccccaggacaaggtaaggactctcccgcgatcactcatgaagaagctcttgctatgatcaaagactgtgaagtgtctatcgacatcagatgtagcgaagaagagaaagacagcgacatcaagacccatccagtactcgggtctaacatctctcataagaaagtgagttacgaagatatcatcggttcaacgatcgtcgatacaaaatgcgtcaagaatctagagtttagcgttcgtatcggagacatgtgcaaggaatcatctgaacttgaggtcaaggatggattcaagtatgtcgacggatcggcatctgaaggtgcaaccgatgatacttcactcatcgattcaacaaaactcaaagcgtgtgtctgaatcgataactctattcatctgaaattggatgagtagggttaatcgaacgattcaggcacaccacgaattaaaaaagtgtaccggacactatattccggtttgcaaaacaaaaatgttcttaactacattcacaaaaagttacctctcgcgacttcttctttttctgtctcaatagtgtgatacgattatgacactattcctattcctattcctatttcctttcagagtatcacaaaaatattaaacctctttctgatggtctcataaaaaaagttttacaaaaatatttttattctctttctctctttgatggtctcataaaaaaagttttacaaaaatatttttattctctttctctctttgatggtctcataaaaaaagttttacaaaaatatttttattctctttctctctttgatggtctcataaaaaaagttttacaaaaatatttttattctctttctctctttgatggtctcataaaaaaagttttacaaaaatatttttattctctttctctctttgatggtctcataaaaaaagttttacaaaaatatttttattctctttctctctttgatggtctcataaaaaaagttttacaaaaatatttttattctctttctctctttgatggtctcataaaaaaagttttacaaaaatatttttattctctttctctctttgatggtctcataaaaaaagttttacaaaaatatttttattctctttctctctttgatggtctcataaaaaaagttttacaaaaatatttttattctctttctctctttgatggtctcataaaaaaagttttacaaaaatatttttattctctttctctctttgatggtctcataaaaaaagttttacaaaaatatttttattctctttctctctttgatggtctcataaaaaagttttacaaaaatatttttattctctttctctctttgatggtctcataaaaaagttttacaaaaatatttttattctctttctctctttgatggtctcataaaaaaagttttacaaaaatatttttattctctttctctctttgatggtctcataa

SEQ ID NO: 38 - DNA, 1665 bp, Artificial Sequence
  Ruc-GFP cDNA
atgacttcgaaagtttatgatccagaacaaaggaaacggatgataactggtccgcagtggtgggccagatgtaaacaaatgaatgttcttgattcatttattaattattatgattcagaaaaacatgcagaaaatgctgttatttttttacatggtaacgcggcctcttcttatttatggcgacatgttgtgccacatattgagccagtagcgcggtgtattataccagatcttattggtatgggcaaatcaggcaaatctggtaatggttcttataggttacttgatcattacaaatatcttactgcatggtttgaacttcttaatttaccaaagaagatcatttttgtcggccatgattggggtgcttgtttggcatttcattatagctatgagcatcaagataagatcaaagcaatagttcacgctgaaagtgtagtagatgtgattgaatcatgggatgaatggcctgatattgaagaagatattgcgttgatcaaatctgaagaaggagaaaaaatggttttggagaataacttcttcgtggaaaccatgttgccatcaaaaatcatgagaaagttagaaccagaagaatttgcagcatatcttgaaccattcaaagagaaaggtgaagttcgtcgtccaacattatcatggcctcgtgaaatcccgttagtaaaaggtggtaaacctgacgttgtacaaattgttaggaattataatgcttatctacgtgcaagtgatgatttaccaaaaatgtttattgaatcggatccaggattcttttccaatgctattgttgaaggcgccaagaagtttcctaatactgaatttgtcaaagtaaaaggtcttcatttttcgcaagaagatgcacctgatgaaatgggaaaatatatcaaatcgttcgttgagcgagttctcaaaaatgaacaagcggccgccgccaccatgagcaagggcgaggaactgttcactggcgtggtcccaattctcgtggaactggatggcgatgtgaatgggcacaaattttctgtcagcggagagggtgaaggtgatgccacatacggaaagctcaccctgaaattcatctgcaccactggaaagctccctgtgccatggccaacactggtcactaccttcacctatggcgtgcagtgcttttccagatacccagaccatatgaagcagcatgactttttcaagagcgccatgcccgagggctatgtgcaggagagaaccatctttttcaaagatgacgggaactacaagacccgcgctgaagtcaagttcgaaggtgacaccctggtgaatagaatcgagctgaagggcattgactttaaggaggatggaaacattctcggccacaagctggaatacaactataactcccacaatgtgtacatcatggccgacaagcaaaagaatggcatcaaggtcaacttcaagatcagacacaacattgaggatggatccgtgcagctggccgaccattatcaacagaacactccaatcggcgacggccctgtgctcctcccagacaaccattacctgtccacccagtctgccctgtctaaagatcccaacgaaaagagagaccacatggtcctgctggagtttgtgaccgctgctgggatcacacatggcatggacgagctgtacaagtga

SEQ ID NO: 39 - protein, 554 aa, Artificial Sequence
  Ruc-GFP protein
MTSKVYDPEQRKRMITGPQWWARCKQMNVLDSFINYYDSEKHAENAVIFLHGNAASSYLWRHVVPHIEPVARCIIPDLIGMGKSGKSGNGSYRLLDHYKYLTAWFELLNLPKKIIFVGHDWGACLAFHYSYEHQDKIKAIVHAESVVDVIESWDEWPDIEEDIALIKSEEGEKMVLENNFFVETMLPSKIMRKLEPEEFAAYLEPFKEKGEVRRPTLSWPREIPLVKGGKPDVVQIVRNYNAYLRASDDLPKMFIESDPGFFSNAIVEGAKKFPNTEFVKVKGLHFSQEDAPDEMGKYIKSFVERVLKNEQAAAATMSKGEELFTGVVPILVELDGDVNGHKFSVSGEGEGDATYGKLTLKFICTTGKLPVPWPTLVTTFTYGVQCFSRYPDHMKQHDFFKSAMPEGYVQERTIFFKDDGNYKTRAEVKFEGDTLVNRIELKGIDFKEDGNILGHKLEYNYNSHNVYIMADKQKNGIKVNFKIRHNIEDGSVQLADHYQQNTPIGDGPVLLPDNHYLSTQSALSKDPNEKRDHMVLLEFVTAAGITHGMDELYK
